(19) United States
(12) Patent Application Publication
(10) Pub. No.: US 2004/0224408 A1
(43) Pub. Date: Nov. 11, 2004

(54) THAP proteins as nuclear receptors for chemokines and roles in transcriptional regulation, cell proliferation and cell differentiation

(76) Inventors: Jean-Philippe Girard, Rebigue (FR); Francois Amalric, Toulouse (FR); Myriam Roussigne, La Bastide sur L'Hers (FR); Thomas Clouaire, Toulouse (FR)

Correspondence Address: KNOBBE MARTENS OLSON & BEAR LLP, 2040 MAIN STREET, FOURTEENTH FLOOR, IRVINE, CA, 92614, US

(21) Appl. No.: 10/733,878

(22) Filed: Dec. 10, 2003

Related U.S. Application Data
(60) Provisional application No. 60/485,027, filed on Jul. 3, 2003.
(60) Provisional application No. 60/432,699, filed on Dec. 10, 2002.

(51) Int. Cl. A61K 48/00; C12N 15/85

(52) U.S. Cl. 435/455; 514/44

(57) ABSTRACT

The invention relates to genes and proteins of the THAP family comprising a THAP domain, and their use in diagnostics, treatment of disease, and in the identification of molecules for the treatment of disease. The invention also relates to uses of THAP-type chemokine-binding agents, such as THAP-family proteins, as a nuclear receptors for a chemokines and to methods for the modulation (stimulation or inhibition) of transcription, cell proliferation and cell differentiation as well as methods for identifying for compounds which modulate THAP-chemokine interactions.

### RELATED APPLICATIONS

[0001] This application is a nonprovisional application which claims priority under 35 U.S.C. § 119(e) to U.S. Provisional Patent Application No. 60/485,027, entitled THAP PROTEINS AS NUCLEAR RECEPTORS FOR CHEMOKINES AND ROLES IN TRANSCRIPTIONAL REGULATION, CELL PROLIFERATION AND CELL DIFFERENTIATION, filed Jul. 3, 2003, and which claims priority under 35 U.S.C. § 119(e) of U.S. Provisional Patent Application No. 60/432,699, entitled THAP PROTEINS AS NUCLEAR RECEPTORS FOR CHEMOKINES AND ROLES IN TRANSCRIPTIONAL REGULATION, CELL PROLIFERATION AND CELL DIFFERENTIATION, filed Dec. 10, 2002. The disclosure of each of the above-listed priority applications is incorporated herein by reference in its entirety.

### FIELD OF THE INVENTION

[0002] The present invention relates to genes and proteins of the THAP (THanatos (death)-Associated Protein) family, and uses thereof. In particular, the invention relates to the role of THAP-type chemokine-binding agents, such as THAP-family polypeptides, in transcriptional regulation and other chemokine-mediated cellular activities.

### BACKGROUND

[0003] Coordination of cell proliferation and cell death is required for normal development and tissue homeostasis in multicellular organisms. A defect in the normal coordination of these two processes is a fundamental requirement for tumorigenesis.

[0004] Progression through the cell cycle is highly regulated, requiring the transit of numerous checkpoints (for review, see Hunter, 1993). The extent of cell death is physiologically controlled by activation of a programmed suicide pathway that results in morphologically recognizable form of death termed apoptosis (Jacobson et al, 1997; Vaux et al., 1994). Both extra-cellular signals, such as tumor necrosis factor, and intracellular signals, like p53, can induce apoptotic cell death. Although many proteins involved in apoptosis or the cell cycle have been identified, the mechanisms by which these two processes are coordinated are not well understood.

[0005] It is well established that molecules which modulate apoptosis have the potential to treat a wide range of conditions relating to cell death and cell proliferation. For example, such molecules may be used for inducing cell death for the treatment of cancers, inhibiting cell death for the treatment of neurodegenerative disorders, and inhibiting or inducing cell death for regulating angiogenesis. However, because many biological pathways controlling cell cycle and apoptosis have not yet been fully elucidated, there is a need for the identification of biological targets for the development of therapeutic molecules for the treatment of these disorders.

[0006] PML Nuclear Bodies

[0007] PML nuclear bodies (PML-NBs), also known as PODs (PML oncogenic domains), ND10 (nuclear domain 10) and Kr bodies, are discrete subnuclear domains that are specifically disrupted in cells from acute promyelocytic leukemia (APL), a distinct subtype of human myeloid leukemia (Maul et al., 2000; Ruggero et al., 2000; Zhong et al., 2000a). Their name derives from their most intensively studied protein component, the promyelocytic leukemia protein (PML), a RING finger IFN-inducible protein encoded by a gene originally cloned as the t(p15; 17) chromosomal translocation partner of the retinoic acid receptor (RAR) locus in APL. In APL cells, the presence of the leukemogenic fusion protein, PML-RAR, leads to the disruption of PML-NBs and the delocalization of PML and other PML-NB proteins into aberrant nuclear structures (Zhong et al., 2000a). Treatment of both APL cell lines and patients with retinoic acid, which induces the degradation of the PML-RAR oncoprotein, results in relocalization of PML and other NBs components into PML-NBs and complete remission of clinical disease, respectively. The deregulation of the PML-NBs by PML-RAR thus appears to play a critical role in tumorigenesis. The analysis of mice, where the PML gene was disrupted by homologous recombination, has revealed that PML functions as a tumor suppressor in vivo (Wang et al., 1998a), that is essential for multiple apoptotic pathways (Wang et al., 1998b). Pm1 −/− mice and cells are protected from Fas, TNFα, ceramide and IFN-induced apoptosis as well as from DNA damage-induced apoptosis. However, the molecular mechanisms through which PML modulates the response to pro-apoptotic stimuli are not well understood (Wang et al., 1998b ; Quignon et al., 1998). Recent studies indicate that PML can participate in both p53-dependent and p53-independent apoptosis pathways (Guo et al., 2000; Fogal et al., 2000). p53-dependent DNA-damage induced apoptosis, transcriptional activation by p53 and induction of p53 target genes are all impaired in PML −/− primary cells (Guo et al., 2000). PML physically interacts with p53 and acts as a transcriptional co-activator for p53. This co-activatory role of PML is absolutely dependent on its ability to recruit p53 in the PML-NBs (Guo et al., 2000; Fogal et al., 2000). The existence of a cross-talk between PML- and p53-dependent growth suppression pathways implies an important role for PML-NBs and PML-NBs-associated proteins as modulators of p53 functions. In addition to p53, the pro-apoptotic factor Daxx could be another important mediator of PML pro-apoptotic activities (Ishov et al., 1999; Zhong et al., 2000b; Li et al., 2000). Daxx was initially identified by its ability to enhance Fas-induced cell death. Daxx interacts with PML and localizes preferentially in the nucleus where it accumulates in the PML-NBs (Ishov et al., 1999; Zhong et al., 2000b; Li et al., 2000). Inactivation of PML results in delocalization of Daxx from PML-NBs and complete abrogation of Daxx pro-apoptotic activity (Zhong et al., 2000b). Daxx has recently been found to possess strong transcriptional repressor activity (Li et al., 2000). By recruiting Daxx to the PML-NBs, PML may inhibit Daxx-mediated transcriptional repression, thus allowing the expression of certain pro-apoptotic genes.

[0008] PML-NBs contain several other proteins in addition to Daxx and p53. These include the autoantigens Sp100 (Sternsdorf et al., 1999) and Sp100-related protein Sp140 (Bloch et al., 1999), the retinoblastoma tumor suppressor pRB (Alcalay et al., 1998), the transcriptional co-activator CBP (LaMorte et al., 1998), the Bloom syndrome DNA helicase BLM (Zhong et al., 1999) and the small ubiquitin-like modifier SUMO-1 (also known as sentrin-1 or PIC1; for recent reviews see Yeh et al., 2000; Melchior, 2000; Jentsch and Pyrowolakis, 2000). Covalent modification of PML by SUMO-1 (sumoylation) appears to play a critical role in PML accumulation into NBs (Muller et al., 1998) and the recruitment of other NBs components to PML-NBs (Ishov et al., 1999; Zhong et al., 2000c).

[0009] Prostate Apoptosis Response-4

[0010] Prostate apoptosis response-4 (PAR4) is a 38 kDa protein initially identified as the product of a gene specifically upregulated in prostate tumor cells undergoing apoptosis (for reviews see Rangnekar, 1998; Mattson et al., 1999). Consistent with an important role of PAR4 in apoptosis, induction of PAR4 in cultured cells is found exclusively during apoptosis and ectopic expression of PAR4 in NIH-3T3 cells (Diaz-Meco et al., 1996), neurons (Guo et al., 1998), prostate cancer and melanoma cells (Sells et al., 1997) has been shown to sensitize these cells to apoptotic stimuli. In addition, down regulation of PAR4 is critical for ras-induced survival and tumor progression (Barradas et al., 1999) and suppression of PAR4 production by antisense technology prevents apoptosis in several systems (Sells et al., 1997; Guo et al., 1998), including different models of neurodegenerative disorders (Mattson et al., 1999), further emphasizing the critical role of PAR4 in apoptosis. At the carboxy terminus, PAR4 contains both a leucine zipper domain (Par4LZ, amino acids 290-332), and a partially overlapping death domain (Par4DD, amino acids 258-332). Deletion of this carboxy-terminal part abrogates the pro-apoptotic function of PAR4 (Diaz-Meco et al., 1996 Sells et al., 1997; Guo et al., 1998). On the other hand, overexpression of PAR4 leucine zipper/death domain acts in a dominant negative manner to prevent apoptosis induced by full-length PAR4 (Sells et al., 1997; Guo et al., 1998). The PAR4 leucine zipper/death domain mediates PAR4 interaction with other proteins by recognizing two different kinds of motifs : zinc fingers of the Wilms tumor suppressor protein WT1 (Johnstone et al., 1996) and the atypical isoforms of protein kinase C (Diaz-Meco et al., 1996), and an arginine-rich domain from the death-associated-protein (DAP)-like kinase Dlk (Page et al., 1999). Among these interactions, the binding of PAR4 to aPKCs and the resulting inhibition of their enzymatic activity is of particular functional relevance because the aPKCs are known to play a key role in cell survival and their overexpression has been shown to abrogate the ability of PAR4 to induce apoptosis (Diaz-Meco et al., 1996; Berra et al., 1997).

[0011] Chemokines

[0012] Chemokines (chemoattractant cytokines) are small secreted polypeptides of about 70-110 amino acids that regulate trafficking and effector functions of leukocytes, and play an important role in inflammation and host defense against pathogens (reviewed in Baggiolini M., et al. (1997) Annu. Rev. inmmunol. 15: 675-705; Proost P., et al. (1996) Int. J. Clin. Lab. Rse. 26: 211-223; Premack, et al. (1996) Nature Medicine 2: 1174-1178; Yoshie, et al. (1997) J. Leukocyte Biol. 62: 634-644). Over 45 different human chemokines have been described to date. They vary in their specificities for different leukocyte types (neutrophils, monocytes, eosinophils, basophils, lymphocytes, dendritic cells, etc.), and in the types of cells and tissues where the chemokines are synthesized. Chemokines are typically produced at sites of tissue injury or stress, where they promote the infiltration of leukocytes into tissues and facilitate an inflammatory response. Some chemokines act selectively on immune system cells such as subsets of T-cells or B lymphocytes or antigen presenting cells, and may thereby promote immune responses to antigens. Some chemokines also have the ability to regulate the growth or migration of hematopoietic progenitor and stem cells that normally differentiate into specific leukocyte types, thereby regulating leukocyte numbers in the blood.

[0013] The activities of chemokines are mediated by cell surface receptors which are members of the family of seven transmembrane, G-protein coupled receptors. At present, over fifteen different human chemokine receptors are known, including CCR1, CCR2, CCR3, CCR4, CCR5, CCR6, CCR7, CCR8, CCR9, CCR10, CCR11, CXCR1, CXCR2, CXCR3, CXCR4 and CXCR5. These receptors vary in their specificites for specific chemokines. Some receptors bind to a single known chemokine, while others bind to multiple chemokines. Binding of a chemokine to its receptor typically induces intracellular signaling responses such as a transient rise in cytosolic calcium concentration, followed by cellular biological responses such as chemotaxis.

[0014] Chemokine SLC/CCL21 (also known as SLC, CKβ-9, 6Ckine, and exodus-2) is a member of the CC (beta)-chemokine subfamily, which shows 21-33% identity to other CC chemokines (Nagira, et al. (1997) J. Biol. Chem. 272:19518-19524; Hromas, et al. (1997) J. Immunol. 159:2554-2558; Hedrick, et al. (1997) J. Immunol. 159:1589-1593). SLC/CCL21 contains the four conserved cysteines characteristic of beta chemokines plus two additional cysteines in its unusually long carboxyl-terminal domain. Human SLC/CCL21 cDNA encodes a 134 amino acid residue, highly basic, precursor protein with a 23 amino acid residue signal peptide that is cleaved to form the predicted 111 amino acid residues mature protein. Mouse SLC/CCL21 cDNA encodes a 133 amino acid residue protein with 23 residue signal peptide that is cleaved to generate the 110 residue mature protein. Human and mouse SLC/CCL21 is highly conserved, exhibiting 86% amino acid sequence identity. The gene for human SLC/CCL21 has been localized at human chromosome 9p13 rather than chromosome 17, where the genes of many human CC chemokines are clustered. The SLC/CCL21 gene location is within a region of about 100 kb as the gene for MIP-3 beta/ELC/CCL19, another recently identified CC chemokine. SLC/CCL21 was previously known to be highly expressed in lymphoid tissues at the mRNA level, and to be a chemoattractant for T and B lymphocytes (Nagira, et al. (1997) J. Biol. Chem. 272:19518-19524; Hromas, et al. (1997) J. Immunol. 159:2554-2558; Hedrick, et al. (1997) J. Immunol. 159:1589-1593; Gunn, et al. (1998) Proc. Natl. Acad. Sci. 95:258-263). SLC/CCL21 also induces both adhesion of lymphocytes to intercellular adhesion molecule-1 and arrest of rolling cells (Campbell, et al. (1998) Science 279:381-384). All of the above properties are consistent with a role for SLC/CCL21 in regulating trafficking of lymphocytes through lymphoid tissues. Unlike most CC chemokines, SLC/CCL21 is not chemotactic for monocytes. However, it has been reported to inhibit hemopoietic progenitor colony formation in a dose-dependent manner (Hromas et al. (1997) J. Immunol. 159: 2554-58).

[0015] Chemokine SLC/CCL21 is a ligand for chemokine receptor CCR7 (Rossi et al. (1997) J. Immunol. 158:1033; Yoshida et al. (1997) J. Biol. Chem. 272:13803; Yoshida et al. (1998) J. Biol. Chem. 273:7118; Campbell et al. (1998) J Cell Biol 141:1053). CCR7 is expressed on T cells and dendritic cells (DC), consistent with the chemotactic action of SLC/CCL21 for both lymphocytes and mature DC. Both memory (CD45RO⁺) and naive (CD45RA⁺) CD4⁺ and CD8⁺ T cells express the CCR7 receptor (Sallusto et al. (1999) Nature 401:708). Within the memory T cell population, CCR7 expression discriminates between T cells with effector function that can migrate to inflamed tissues (CCR7⁻) vs. T cells that require a secondary stimulus prior to displaying effector functions (CCR7⁺) (Sallusto et al. (1999) Nature 401:708). Unlike mature DC, immature DC do not express CCR7 nor do they respond to the chemotactic action of CCL21 (Sallusto et al. (1998) Eur. J. Immunol. 28:2760; Dieu et al. (1998) J. Exp. Med. 188:373).

[0016] A key function of CCR7 and its two ligands SLC/CCL21 and MIP3b/CCL19 is facilitating recruitment and retention of cells to secondary lymphoid organs in order to promote efficient antigen exposure to T cells. CCR7-deficient mice demonstrate poorly developed secondary organs and exhibit an irregular distribution of lymphocytes within lymph nodes, Peyer's patches, and splenic periarteriolar lymphoid sheaths (Forster et al. (1999) Cell 99:23). These animals have severely impaired primary T cell responses largely due to the inability of interdigitating DC to migrate to the lymph nodes (Forster et al. (1999) Cell 99:23). The overall findings to date support the notion that CCR7 and its two ligands, CCL19 and CCL21, are key regulators of T cell responses via their control of T cell/DC interactions. CCR7 is an important regulatory molecule with an instructive role in determining the migration of cells to secondary lymphoid organs (Forster et al. (1999) Cell 99:23; Nakano et al. (1998) Blood 91:2886).

### SUMMARY OF THE INVENTION

[0017] THAP1 (THanatos-Associated-Protein-1)

[0018] In the past few years, the inventors have focused on the molecular characterization of novel genes expressed in the specialized endothelial cells (HEVECs) of post-capillary high endothelial venules (Girard and Springer, 1995a; Girard and Springer, 1995b; Girard et al., 1999). In the present invention, they report the analysis of THAP1 (for THanatos (death)-Associated Protein-1), a protein that localizes to PML-NBs. Two hybrid screening of an HEVEC cDNA library with the THAP1 bait lead to the identification of a unique interacting partner, the pro-apoptotic protein PAR4. PAR4 is also found to accumulate into PML-NBs and targeting of the THAP1/PAR4 complex to PML-NLs is mediated by PML. Similarly to PAR4, THAP1 is a pro-apoptotic polypeptide. Its pro-apoptotic activity requires a novel protein motif in the amino-terminal part called THAP domain. Together these results define a novel PML-NBs pathway for apoptosis that involves the THAP1/PAR4 pro-apoptotic complex.

[0019] Embodiments of the present invention includes genes, proteins and biological pathways involved in apoptosis. In some embodiments, the genes, proteins, and pathways disclosed herein may be used for the development of polypeptide, nucleic acid or small molecule therapeutics.

[0020] One embodiment of the present invention provides a novel protein motif, the THAP domain. The present inventors initially identified the THAP domain as a 90 residue protein motif in the amino-terminal part of THAP1 and which is essential for THAP1 pro-apoptotic activity. THAP1 (THanatos (death) Associated Protein-1), as determined by the present inventors, is a pro-apoptotic polypeptide which forms a complex with the pro-apoptotic protein PAR4 and localizes in discrete subnuclear domains known as PML nuclear bodies. However, the THAP domain also defines a novel family of proteins, the THAP family, and the inventors have also provided at least twelve distinct members in the human genome (THAP-0 to THAP11), all of which contain a THAP domain (typically 80-90 amino acids) in their amino-terminal part. The present invention thus includes nucleic acid molecules, including in particular the complete cDNA sequences, encoding members of the THAP family, portions thereof encoding the THAP domain or polypeptides homologous thereto, as well as to polypeptides encoded by the THAP family genes. The invention thus also includes diagnostic and activity assays, and uses in therapeutics, for THAP family proteins or portions thereof, as well as drug screening assays for identifying compounds capable of inhibiting (or stimulating) pro-apoptotic activity of a THAP family member.

[0021] In one example of a THAP family member, THAP1 is determined to be an apoptosis inducing polypeptide expressed in human endothelial cells (HEVECs), providing characterization of the THAP sequences required for apoptosis activity in the THAP1 polypeptide. In further aspects, the invention is also directed to the interaction of THAP1 with the pro-apoptotic protein PAR4 and with PML-NBs, including methods of modulating THAP1/PAR4 interactions for the treatment of disease. The invention also concerns interaction between PAR4 and PML-NBs, diagnostics for detection of said interaction (or localization) and modulation of said interactions for the treatment of disease.

[0022] Compounds which modulate interactions between a THAP family member and a THAP-family target molecule, a THAP domain or THAP-domain target molecule, or a PAR4 and a PML-NBs protein may be used in inhibiting (or stimulating) apoptosis of different cell types in various human diseases. For example, such compounds may be used to inhibit or stimulate apoptosis of endothelial cells in angiogenesis-dependent diseases including but not limited to cancer, cardiovascular diseases, inflammatory diseases, and to inhibit apoptosis of neurons in acute and chronic neurodegenerative disorders, including but not limited to Alzheimer's, Parkinson's and Huntington's diseases, amyotrophic lateral sclerosis, HIV encephalitis, stroke, epileptic seizures).

[0023] Oligonucleotide probes or primers hybridizing specifically with a THAP1 genomic DNA or cDNA sequence are also part of the present invention, as well as DNA amplification and detection methods using said primers and probes.

[0024] Fragments of THAP family members or THAP domains include fragments encoded by nucleic acids comprising at least 12, 15, 18, 20, 25, 30, 35, 40, 50, 60, 70, 80, 90, 100, 150, 200, 500, or 1000 consecutive nucleotides selected from the group consisting of SEQ ID NOs: 160-175, or polypeptides comprising at least 8, 10, 12, 15, 20, 25, 30, 40, 50, 100, 150 or 200 consecutive amino acids selected from the group consisting of SEQ ID NOs: 1-114.

[0025] A further aspect of the invention includes recombinant vectors comprising any of the nucleic acid sequences described above, and in particular to recombinant vectors comprising a THAP1 regulatory sequence or a sequence encoding a THAP1 protein, THAP family member, THAP domain, fragments of THAP family members and THAP domains, homologues of THAP family members/THAP domains, as well as to cell hosts and transgenic non human animals comprising said nucleic acid sequences or recombinant vectors.

[0026] Another aspect of the invention relates to methods for the screening of substances or molecules that inhibit or increase the expression of the THAP1 gene or genes encoding THAP family members, as well as with methods for the screening of substances or molecules that interact with and/or inhibit or increase the activity of a THAP1 polypeptide or THAP family polypeptide.

[0027] In accordance with another aspect, the present invention provides a medicament comprising an effective amount of a THAP family protein, e. g. THAP1, or a SLC/CCL21-binding fragment thereof, together with a pharmaceutically acceptable carrier. The medicaments described herein may be useful for treatment and/or prophylaxis.

[0028] As related to another aspect, the invention is concerned in particular with the use of a THAP family protein, homologs thereof and fragments thereof, for example THAP1, or a SLC/CCL21-binding fragment thereof as an anti-inflammatory agent. The THAP family protein, for example, THAP1 and fragments thereof will be useful for the treatment of conditions mediated by SLC/CCL21.

[0029] In a further aspect, the present invention provides a detection method comprising the steps of providing a SLC/CCL21 chemokine-binding molecule which is a THAP family protein, for example, THAP1, or an SLC/CCL21-binding fragment thereof, contacting the SLC/CCL21-binding THAP1 molecule with a sample, and detecting an interaction of the SLC/CCL21-binding THAP1 molecule with SLC/CCL21 chemokine in the sample.

[0030] In one example, the invention may be used to detect the presence of SLC/CCL21 chemokine in a biological sample. The SLC/CCL21-binding THAP1 molecule may be usefully immobilized on a solid support, for example as a THAP1/Fc fusion.

[0031] In accordance with another aspect, the present invention provides a method for inhibiting the activity of SLC/CCL21 chemokine in a sample, which method comprises contacting the sample with an effective amount of a SLC/CCL21 chemokine-binding molecule which is a THAP1 protein or a SLC/CCL21-binding fragment thereof.

[0032] In further aspects the invention provides a purified THAP1 protein or a SLC/CCL21-binding fragment thereof, or a THAP1/Fc fusion, for use in a method or a medicament as described herein; and a kit comprising such a purified THAP1 protein or fragment.

[0033] Some embodiments of the invention also envisage the use of fragments of the THAP1 protein, which fragments have SLC/CCL21 chemokine-binding properties. The fragments may be peptides derived from the protein. Use of such peptides can be preferable to the use of an entire protein or a substantial part of a protein, for example because of the reduced immunogenicity of a peptide compared to a protein. Such peptides may be prepared by a variety of techniques including recombinant DNA techniques and synthetic chemical methods.

[0034] In addition to the above properties, THAP1 has the capability to bind to several additional chemokines. Such chemokines include, but are not limited to, ELC/CCL19, RANTES CCL5, MIG/CXCL9 and IP10/CXCL10. As such, further aspects of the present invention relate to the binding of chemokines by THAP1, a chemokine binding domain of THAP1, and polypeptides having at least 30% amino acid identity to THAP1 or a chemokine-binding domain of THAP1. Also contemplated is the binding of chemokines to oligomers and Fc immunoglobulin fusions of the above-listed polypeptides.

[0035] According to some aspects of the present invention, a THAP1 polypeptide, a chemokine-binding domain of THAP1, polypeptides having at least 30% amino acid identity to THAP1 or a chemokine-binding domain of THAP1 as well as oligomers or Fc immunoglobulin fusions of these proteins can be used in pharmaceutical compositions and/or medicaments for reducing the symptoms associated with inflammation and/or inflammatory diseases. As such, some aspects of the present invention include pharmaceutical compositions and/or medicaments comprising THAP1 protein, a chemokine-binding domain of THAP1, polypeptides having at least 30% amino acid identity to THAP1 or a chemokine-binding domain of THAP1 as well as oligomers or Fe immunoglobulin fusions of these proteins.

[0036] Yet other aspects of the invention relate THAP-family polypeptides, chemokine binding domains of THAP-family peptides, fusions of a THAP-family polypeptide with an immunoglobulin Fc region, fusions of a chemokine-binding domain of a THAP-family peptide with an immunoglobulin Fc region, oligomers of THAP family polypeptides, chemokine-binding domains of THAP family peptides, THAP-family peptide-Fc fusions, and chemokine-binding domain of THAP-family peptide-Fc fusions as well as polypeptides having at least 30% amino acid identity to any of the above-listed polypeptides. Pharmaceutical compositions which include one or more of these polypeptides are also contemplated.

[0037] Aspects of the invention relate to methods of binding a chemokine, inhibiting the activity of a chemokine, reducing or ameliorating the symptoms of a condition mediated or influenced by one or more chemokines, preventing the symptoms of a condition mediated or influenced by one or more chemokines and detecting a chemokine by using chemokine-binding agents such as THAP-family polypeptides, chemokine binding domains of THAP-family peptides, fusions of a THAP-family polypeptide with an immunoglobulin Fc region, fusions of a chemokine-binding domain of a THAP-family peptide with an immunoglobulin Fc region, oligomers of THAP family polypeptides, chemokine-binding domains of THAP family peptides, THAP-family peptide-Fc fusions, and chemokine-binding domain of THAP-family peptide-Fc fusions as well as polypeptides having at least 30% amino acid identity to any of the above-listed polypeptides.

[0038] Still other aspects of the present invention relate to methods modulating chemokine interactions with cellular receptors. Such receptors can be extracellular or can be molecules that are present within the cell. In some embodiments, chemokine interaction with one or more cellular receptors is modulated with one or more chemokine-binding agents, such as THAP-family polypeptides, chemokine binding domains of THAP-family peptides, fusions of a THAP-family polypeptide with an immunoglobulin Fc region, fusions of a chemokine-binding domain of a THAP-family peptide with an immunoglobulin Fc region, oligomers of THAP family polypeptides, chemokine-binding domains of THAP family peptides, THAP-family peptide-Fc fusions, and chemokine-binding domain of THAP-family peptide-Fc fusions as well as polypeptides having at least 30% amino acid identity to any of the above-listed polypeptides.

[0039] Some embodiments of the present invention relate to chemokines or chemokine complexes that are present within the nucleus of the cell and which modulate transcription. In some embodiments, complexes that are capable of modulating transcription comprise chemokines and chemokine-binding agents, such as THAP-family polypeptides, chemokine binding domains of THAP-family peptides, fusions of a THAP-family polypeptide with an immunoglobulin Fc region, fusions of a chemokine-binding domain of a THAP-family peptide with an immunoglobulin Fc region, oligomers of THAP family polypeptides, chemokine-binding domains of THAP family peptides, THAP-family peptide-Fc fusions, and chemokine-binding domain of THAP-family peptide-Fc fusions as well as polypeptides having at least 30% amino acid identity to any of the above-listed polypeptides. In some embodiments, the expression of one or more genes that are under the control of a THAP responsive promoter is modulated.

[0040] It will also be evident that the THAP-family proteins for use in the invention may be prepared in a variety of ways, in particular as recombinant proteins in a variety of expression systems. Any standard systems may be used such as baculovirus expression systems or mammalian cell line expression systems.

[0041] Other aspects of the invention are described in the following numbered paragraphs:

[0042] 1. A method of identifying a candidate modulator of apoptosis comprising:

[0043] (a) contacting a THAP-family polypeptide or a biologically active fragment thereof with a test compound, wherein said THAP-family polypeptide comprises at least 30% amino acid identity to an amino acid sequence selected from the group consisting of SEQ ID NOs: 1-114; and

[0044] (b) determining whether said compound selectively modulates the activity of said polypeptide;

[0045] wherein a determination that said test compound selectively modulates the activity of said polypeptide indicates that said compound is a candidate modulator of apoptosis.

[0046] 2. The method of Paragraph 1, wherein the THAP-family polypeptide comprises the amino acid sequence of SEQ ID NO: 3, or a biologically active fragment thereof.

[0047] 3. The method of Paragraph 1, wherein the THAP-family polypeptide comprises the amino acid sequence of SEQ ID NO: 4, or a biologically active fragment thereof.

[0048] 4. The method of Paragraph 1, wherein the THAP-family polypeptide comprises the amino acid sequence of SEQ ID NO: 5, or a biologically active fragment thereof.

[0049] 5. The method of Paragraph 1, wherein the THAP-family polypeptide comprises the amino acid sequence of SEQ ID NO: 6, or a biologically active fragment thereof.

[0050] 6. The method of Paragraph 1, wherein the THAP-family polypeptide comprises the amino acid sequence of SEQ ID NO: 7, or a biologically active fragment thereof.

[0051] 7. The method of Paragraph 1, wherein the THAP-family polypeptide comprises the amino acid sequence of SEQ ID NO: 8, or a biologically active fragment thereof.

[0052] 8. The method of Paragraph 1, wherein the THAP-family polypeptide comprises the amino acid sequence of SEQ ID NO: 9, or a biologically active fragment thereof.

[0053] 9. The method of Paragraph 1, wherein the THAP-family polypeptide comprises the amino acid sequence of SEQ ID NO: 10, or a biologically active fragment thereof.

[0054] 10. The method of Paragraph 1, wherein the THAP-family polypeptide comprises the amino acid sequence of SEQ ID NO: 11, or a biologically active fragment thereof.

[0055] 11. The method of Paragraph 1, wherein the THAP-family polypeptide comprises the amino acid sequence of SEQ ID NO: 12, or a biologically active fragment thereof.

[0056] 12. The method of Paragraph 1, wherein the THAP-family polypeptide comprises the amino acid sequence of SEQ ID NO: 13, or a biologically active fragment thereof.

[0057] 13. The method of Paragraph 1, wherein the THAP-family polypeptide comprises the amino acid sequence of SEQ ID NO: 14, or a biologically active fragment thereof.

[0058] 14. The method of Paragraph 1, wherein the THAP-family polypeptide comprises the amino acid sequence selected from the group consisting of SEQ ID NOs: 15-114, and biologically active fragments thereof.

[0059] 15. The method of Paragraph 1, wherein said biologically active fragment of said THAP-family protein has at least one biological activity selected from the group consisting of interaction with a THAP-family target protein, binding to a nucleic acid sequence, binding to PAR-4, binding to PML, binding to a polypeptide found in PML-NBs, localization to PML-NBs, targeting a THAP-family target protein to PML-NBs, and inducing apoptosis.

[0060] 16. The methods of any one of Paragraphs 2-15 wherein said THAP-family polypeptide has at least one biological activity selected from the group consisting of interaction with a THAP-family target protein, binding to a nucleic acid sequence, binding to PAR-4, binding to PML, binding to a polypeptide found in PML-NBs, localization to PML-NBs, targeting a THAP-family target protein to PML-NBs, and inducing apoptosis.

[0061] 17. An isolated nucleic acid encoding a polypeptide having apoptotic activity, said polypeptide consisting essentially of an amino acid sequence selected from the group consisting of:

[0062] (a) amino acid positions 1-90 of SEQ ID NO: 2, a fragment thereof having apoptotic activity, or a polypeptide having at least 30% amino acid identity thereto;

[0063] (b) a polypeptide comprising a THAP-family domain consisting essentially of amino acid positions 1 to 89 of SEQ ID NO: 3, a fragment thereof having apoptotic activity, or a polypeptide having at least 30% amino acid identity thereto;

[0064] (c) a polypeptide comprising a THAP-family domain consisting essentially of amino acid positions 1 to 89 of SEQ ID NO: 4, a fragment thereof having apoptotic activity, or a polypeptide having at least 30% amino acid identity thereto;

[0065] (d) a polypeptide comprising a THAP-family domain consisting essentially of amino acid positions 1 to 89 of SEQ ID NO: 5, a fragment thereof having apoptotic activity, or a polypeptide having at least 30% amino acid identity thereto;

[0066] (e) a polypeptide comprising a THAP-family domain consisting essentially of amino acid positions 1 to 90 of SEQ ID NO: 6, a fragment thereof having apoptotic activity or a polypeptide having at least 30% amino acid identity thereto;

[0067] (f) a polypeptide comprising a THAP-family domain consisting essentially of amino acid positions 1 to 90 of SEQ ID NO: 7, a fragment thereof having apoptotic activity, or a polypeptide having at least 30% amino acid identity thereto;

[0068] (g) a polypeptide comprising a THAP-family domain consisting essentially of amino acid positions 1 to 90 of SEQ ID NO: 8, a fragment thereof having apoptotic activity; or a polypeptide having at least 30% amino acid identity thereto;

[0069] (h) a polypeptide comprising a THAP-family domain consisting essentially of amino acid positions 1 to 90 of SEQ ID NO: 9, a fragment thereof having apoptotic activity, or a polypeptide having at least 30% amino acid identity thereto;

[0070] (i) a polypeptide comprising a THAP-family domain consisting essentially of amino acid positions 1 to 92 of SEQ ID NO: 10, a fragment thereof having apoptotic activity or a polypeptide having at least 30% amino acid identity thereto;

[0071] (j) a polypeptide comprising a THAP-family domain consisting essentially of amino acid positions 1 to 90 of SEQ ID NO: 11, a fragment thereof having apoptotic activity, or a polypeptide having at least 30% amino acid identity thereto;

[0072] (k) a polypeptide comprising a THAP-family domain consisting essentially of amino acid positions 1 to 90 of SEQ ID NO: 12, or a fragment thereof having apoptotic activity, or a polypeptide having at least 30% amino acid identity thereto;

[0073] (l) a polypeptide comprising a THAP-family domain consisting essentially of amino acid positions 1 to 90 of SEQ ID NO: 13, a fragment thereof having apoptotic activity, or a polypeptide having at least 30% amino acid identity thereto; and

[0074] (m) a polypeptide comprising a THAP-family domain consisting essentially of amino acid positions 1 to 90 of SEQ ID NO: 14, a fragment thereof having apoptotic activity, or a polypeptide having at least 30% amino acid identity thereto.

[0075] 18. An isolated nucleic acid encoding a THAP-family polypeptide having apoptotic activity selected from the group consisting of:

[0076] (i) a nucleic acid molecule encoding a polypeptide comprising the amino acid sequence of a sequence selected from the group consisting of SEQ ID NOs: 1-114;

[0077] (ii) a nucleic acid molecule comprising the nucleic acid sequence of a sequence selected from the group consisting of SEQ ID NOs: 160-175 and the sequences complementary thereto; and

[0078] (iii) a nucleic acid the sequence of which is degenerate as a result of the genetic code to the sequence of a nucleic acid as defined in (i) and (ii).

[0079] 19. The nucleic acid of Paragraph 18, wherein said nucleic acid comprises a nucleic acid selected from the group consisting of SEQ ID NOs. 5, 7, 8 and 11.

[0080] 20. The nucleic acid of Paragraph 18, wherein said nucleic acid comprises a nucleic acid selected from the group consisting of SEQ ID NOs. 162, 164, 165 and 168.

[0081] 21. An isolated nucleic acid encoding a THAP-family polypeptide having apoptotic activity comprising:

[0082] (i) the nucleic acid sequence of SEQ ID NOs: 1-2 or the sequence complementary thereto; or

[0083] (ii) a nucleic acid molecule encoding a polypeptide comprising the amino acid sequence of SEQ ID NOs 1-2;

[0084] 22. An isolated nucleic acid, said nucleic acid comprising a nucleotide sequence encoding:

[0085] i) a polypeptide comprising an amino acid sequence having at least about 80% identity to a sequence selected from the group consisting of the polypeptides of SEQ ID NOs: 1-114 and the polypeptides encoded by the nucleic acids of SEQ ID NOs: 160-175 or

[0086] ii) a fragment of said polypeptide which possesses apoptotic activity.

[0087] 23. The nucleic acid of Paragraph of Paragraph 23, wherein said nucleic acid encodes a polypeptide comprising an amino acid sequence having at least about 80% identity to a sequence selected from the group consisting of the polypeptides of SEQ ID NOs: 5, 7, 8 and 11 and the polypeptides encoded by the nucleic acids of SEQ ID NOs: 162, 164, 165 and 168 or a fragment of said polypeptide which possesses apoptotic activity.

[0088] 24. The nucleic acid of Paragraph 23, wherein said polypeptide comprises an amino acid sequence selected from the group consisting of the sequences of SEQ ID NOs: 5, 7, 8 and 11 and the polypeptides encoded by the nucleic acids of SEQ ID NOs: 162, 164, 165 and 168.

[0089] 25. The nucleic acid of Paragraph 23, wherein polypeptide identity is determined using an algorithm selected from the group consisting of XBLAST with the parameters score=50 and wordlength=3, Gapped BLAST with the default parameters of XBLAST, and BLAST with the default parameters of XBLAST.

[0090] 26. The nucleic acid of Paragraph 17, wherein said nucleic acid is operably linked to a promoter.

[0091] 27. An expression cassette comprising the nucleic acid of Paragraph 26.

[0092] 28. A host cell comprising the expression cassette of Paragraph 27.

[0093] 29. A method of making a THAP-family polypeptide, said method comprising

[0094] providing a population of host cells comprising a recombinant nucleic acid encoding said THAP-family protein of any one of SEQ ID NOs. 1-114; and

[0095] culturing said population of host cells under conditions conducive to the expression of said recombinant nucleic acid;

[0096] whereby said polypeptide is produced within said population of host cells.

[0097] 30. The method of Paragraph 29 wherein said providing step comprises providing a population of host cells comprising a recombinant nucleic acid encoding said THAP-family protein of any one of SEQ ID NOs. 5, 7, 8 and 11.

[0098] 31. The method of Paragraph 29, further comprising purifying said polypeptide from said population of cells.

[0099] 32. An isolated THAP polypeptide encoded by the nucleic acid of any one of SEQ ID Nos. 160-175.

[0100] 33. The polypeptide of Paragraph 32, wherein said polypeptide is encoded by a nucleic acid selected from the group consisting of SEQ ID NOs. 5, 7, 8, 11, 162, 164, 165 and 168.

[0101] 34. The polypeptide of Paragraph 32, wherein said polypeptide has at least one activity selected from the group consisting of interaction with a THAP-family target protein, binding to a nucleic acid sequence, binding to PAR-4, binding to PML, binding to a polypeptide found in PML-NBs, localization to PML-NBs, targeting a THAP-family target protein to PML-NBs, and inducing apoptosis.

[0102] 35. An isolated THAP polypeptide or fragment thereof, said polypeptide comprising at least 12 contiguous amino acids of a sequence selected from the group consisting of SEQ ID NOs: 1-114.

[0103] 36. The polypeptide of Paragraph 35, wherein said polypeptide comprises at least 12 contiguous amino acids of a sequence selected from the group consisting of SEQ ID NOs. 5, 7, 8, and 11.

[0104] 37. The polypeptide of Paragraph 35, wherein said polypeptide has at least one activity selected from the group consisting of interaction with a THAP-family target protein, binding to a nucleic acid sequence, binding to PAR-4, binding to PML, binding to a polypeptide found in PML-NBs, localization to PML-NBs, targeting a THAP-family target protein to PML-NBs, and inducing apoptosis.

[0105] 38. An isolated THAP polypeptide or fragment thereof, said polypeptide comprising an amino acid sequence having at least about 80% amino acid sequence identity to a sequence selected from the group consisting of SEQ ID NOs: 1-114 or a fragment thereof, said polypeptide or fragment thereof having at least one activity selected from the group consisting of interaction with a THAP-family target protein, binding to a nucleic acid sequence, binding to PAR-4, binding to PML, binding to a polypeptide found in PML-NBs, localization to PML-NBs, targeting a THAP-family target protein to PML-NBs, and inducing apoptosis.

[0106] 39. The polypeptide of Paragraph 38, wherein said THAP polypeptide or fragment thereof comprises an amino acid sequence having at least about 80% amino acid sequence identity to a sequence selected from the group consisting of SEQ ID NOs: 5, 7, 8 and 11 or a fragment thereof having at least one activity selected from the group consisting of interaction with a THAP-family target protein, binding to a nucleic acid sequence, binding to PAR-4, binding to PML, binding to a polypeptide found in PML-NBs, localization to PML-NBs, targeting a THAP-family target protein to PML-NBs, and inducing apoptosis.

[0107] 40. The polypeptide of Paragraph 38, wherein said polypeptide is selectively bound by an antibody raised against an antigenic polypeptide, or antigenic fragment thereof, said antigenic polypeptide comprising the polypeptide of any one of SEQ ID NOs: 1-114.

[0108] 41. The polypeptide of Paragraph 38, wherein said polypeptide is selectively bound by an antibody raised against an antigenic polypeptide, or antigenic fragment thereof, said antigenic polypeptide comprising the polypeptide of any one of SEQ ID NOs: 5, 7, 8 and 11.

[0109] 42. The polypeptide of Paragraph 38, wherein said polypeptide comprises the polypeptide of SEQ ID NOs: 1-114.

[0110] 43. The polypeptide of Paragraph 38, wherein said polypeptide comprises a polypeptide selected from the group consisting of SEQ ID NOs. 5, 7, 8 and 11.

[0111] 44. An antibody that selectively binds to the polypeptide of Paragraph 38.

[0112] 45. An antibody according to Paragraph 44, wherein said antibody is capable of inhibiting binding of said polypeptide to a THAP-family target polypeptide.

[0113] 46. An antibody according to Paragraph 44, wherein said antibody is capable of inhibiting apoptosis mediated by said polypeptide.

[0114] 47. The polyptide of Paragraph 38, wherein identity is determined using an algorithm selected from the group consisting of XBLAST with the parameters score=50 and wordlength=3, Gapped BLAST with the default parameters of XBLAST, and BLAST with the default parameters of XBLAST.

[0115] 48. A method of assessing the biological activity of a THAP-family polypeptide comprising:

[0116] (a) providing a THAP-family polypeptide or a fragment thereof; and

[0117] (b) assessing the ability of the THAP-family polypeptide to induce apoptosis of a cell.

[0118] 49. A method of assessing the biological activity of a THAP-family polypeptide comprising:

[0119] (a) providing a THAP-family polypeptide or a fragment thereof; and

[0120] (b) assessing the DNA binding activity of the THAP-family polypeptide.

[0121] 50. The method of Paragraphs 48 or 49, wherein step (a) comprises introducing to a cell a recombinant vector comprising a nucleic acid encoding a THAP-family polypeptide.

[0122] 51. The method of Paragraphs 49 or 50, wherein the THAP-family polypeptide comprises a THAP consensus amino acid sequence depicted in SEQ ID NOs: 1-2, or a fragment thereof having at least one activity selected from the group consisting of interaction with a THAP-family target protein, binding to a nucleic acid sequence, binding to PAR-4, binding to PML, binding to a polypeptide found in PML-NBs, localization to PML-NBs, targeting a THAP-family target protein to PML-NBs, and inducing apoptosis.

[0123] 52. The method of Paragraph 49, wherein the THAP-family polypeptide comprises an amino acid sequence selected from the group of sequences consisting of SEQ ID NOs: 1-114 or a fragment thereof having at least one activity selected from the group consisting of interaction with a THAP-family target protein, binding to a nucleic acid sequence, binding to PAR-4, binding to PML, binding to a polypeptide found in PML-NBs, localization to PML-NBs, targeting a THAP-family target protein to PML-NBs, and inducing apoptosis.

[0124] 53. The method of Paragraph 49, wherein the THAP-family polypeptide comprises a native THAP-family polypeptide, or a fragment thereof having at least one activity selected from the group consisting of interaction with a THAP-family target protein, binding to a nucleic acid sequence, binding to PAR-4, binding to PML, binding to a polypeptide found in PML-NBs, localization to PML-NBs, targeting a THAP-family target protein to PML-NBs, and inducing apoptosis.

[0125] 54. The method of Paragraph 49, wherein the THAP-family polypeptide comprises a THAP-family polypeptide or a fragment thereof having at least one activity selected from the group consisting of interaction with a THAP-family target protein, binding to a nucleic acid sequence, binding to PAR-4, binding to PML, binding to a polypeptide found in PML-NBs, localization to PML-NBs, targeting a THAP-family target protein to PML-NBs, and inducing apoptosis, wherein said THAP-family polypeptide or fragment thereof comprises at least one amino acid deletion, substitution or insertion.

[0126] 55. An isolated THAP-family polypeptide comprising an amino acid sequence of SEQ ID NOs: 1-114, wherein said polypeptide comprises at least one amino acid deletion, substitution or insertion with respect to said amino acid sequence of SEQ ID NOs. 1-114.

[0127] 56. A THAP-family polypeptide comprising an amino acid sequence selected from the group consisting of SEQ ID NOs: 1-114, wherein said polypeptide comprises at least one amino acid deletion, substitution or insertion with respect to said amino acid sequence of one of SEQ ID NOs. 1-114 and displays a reduced ability to induce apoptosis or bind DNA compared to the wild-type polypeptide.

[0128] 57. A THAP-family polypeptide comprising an amino acid sequence of SEQ ID NOs: 1-114, wherein said polypeptide comprises at least one amino acid deletion, substitution or insertion with respect to said amino acid sequence of one of SEQ ID NOs. 1-114 and displays a increased ability to induce apoptosis or bind DNA compared to the wild-type polypeptide.

[0129] 58. A method of determining whether a THAP-family polypeptide is expressed within a biological sample, said method comprising the steps of:

[0130] (a) contacting a biological sample from a subject with:

[0131] a polynucleotide that hybridizes under stringent conditions to a nucleic acid of SEQ ID NOs: 160-175 or

[0132] a detectable polypeptide that selectively binds to the polypeptide of SEQ ID NOs: 1-114; and

[0133] (b) detecting the presence or absence of hybridization between said polynucleotide and an RNA species within said sample, or the presence or absence of binding of said detectable polypeptide to a polypeptide within said sample;

[0134] wherein a detection of said hybridization or of said binding indicates that said THAP-family polypeptide is expressed within said sample.

[0135] 59. The method of Paragraph 58, wherein said subject suffers from, is suspected of suffering from, or is susceptible to a cell proliferative disorder.

[0136] 60. The method of Paragraph 59, wherein said cell proliferative disorder is a disorder related to regulation of apoptosis.

[0137] 61. The method of Paragraph 58, wherein said polynucleotide is a primer, and wherein said hybridization is detected by detecting the presence of an amplification product comprising said primer sequence.

[0138] 62. The method of Paragraph 58, wherein said detectable polypeptide is an antibody.

[0139] 63. A method of assessing THAP-family activity in a biological sample, said method comprising the steps of:

[0140] (a) contacting a nucleic acid molecule comprising a binding site for a THAP-family polypeptide with:

[0141] (i) a biological sample from a subject or

[0142] (ii) a THAP-family polypeptide isolated from a biological sample from a subject, the polypeptide comprising the amino acid sequences of one of SEQ ID NOs: 1-114; and

[0143] (b) assessing the binding between said nucleic acid molecule and a THAP-family polypeptide

[0144] wherein a detection of decreased binding compared to a reference THAP-family nucleic acid binding level indicates that said sample comprises a deficiency in THAP-family activity.

[0145] 64. A method of determining whether a mammal has an elevated or reduced level of THAP-family expression, said method comprising the steps of:

[0146] (a) providing a biological sample from said mammal; and

[0147] (b) comparing the amount of a THAP-family polypeptide of SEQ ID NOs: 1-114 or of a THAP-family RNA species encoding a polypeptide of SEQ ID NOs: 1-114 within said biological sample with a level detected in or expected from a control sample;

[0148] wherein an increased amount of said THAP-family polypeptide or said THAP-family RNA species within said biological sample compared to said level detected in or expected from said control sample indicates that said mammal has an elevated level of THAP-family expression, and wherein a decreased amount of said THAP-family polypeptide or said THAP-family RNA species within said biological sample compared to said level detected in or expected from said control sample indicates that said mammal has a reduced level of THAP-family expression.

[0149] 65. The method of Paragraph 64, wherein said mammal suffers from, is suspected of suffering from, or is susceptible to a cell proliferative disorder.

[0150] 66. A method of identifying a candidate inhibitor of a THAP-family polypeptide, a candidate inhibitor of apoptosis, or a candidate compound for the treatment of a cell proliferative disorder, said method comprising:

[0151] (a) contacting a THAP-family polypeptide according to SEQ ID NOs: 1-114 or a fragment comprising a contiguous span of at least 6 contiguous amino acids of a polypeptide according to SEQ ID NOs: 1-114 with a test compound; and

[0152] (b) determining whether said compound selectively binds to said polypeptide;

[0153] wherein a determination that said compound selectively binds to said polypeptide indicates that said compound is a candidate inhibitor of a THAP-family polypeptide, a candidate inhibitor of apoptosis, or a candidate compound for the treatment of a cell proliferative disorder.

[0154] 67. A method of identifying a candidate inhibitor of apoptosis, a candidate compound for the treatment of a cell proliferative disorder, or a candidate inhibitor of a THAP-family polypeptide of SEQ ID NOs: 1-114 or a fragment comprising a contiguous span of at least 6 contiguous amino acids of a polypeptide according to SEQ ID NOs: 1-114, said method comprising:

[0155] (a) contacting said THAP-family polypeptide with a test compound; and

[0156] (b) determining whether said compound selectively inhibits at least one biological activity selected from the group consisting of interaction with a THAP-family target protein, binding to a nucleic acid sequence, binding to PAR-4, binding to PML, binding to a polypeptide found in PML-NBs, localization to PML-NBs, targeting a THAP-family target protein to PML-NBs, and inducing apoptosis;

[0157] wherein a determination that said compound selectively inhibits said at least one biological activity of said polypeptide indicates that said compound is a candidate inhibitor of a THAP-family polypeptide, a candidate inhibitor of apoptosis, or a candidate compound for the treatment of a cell proliferative disorder.

[0158] 68. A method of identifying a candidate inhibitor of apoptosis, a candidate compound for the treatment of a cell proliferative disorder, or a candidate inhibitor of a THAP-family polypeptide of SEQ ID NOs: 1-114 or a fragment comprising a contiguous span of at least 6 contiguous amino acids of a polypeptide according to SEQ ID NOs: 1-114, said method comprising:

[0159] (a) contacting a cell comprising said THAP-family polypeptide with a test compound; and

[0160] (b) determining whether said compound selectively inhibits at least one biological activity selected from the group consisting of interaction with a THAP-family target protein, binding to a nucleic acid sequence, binding to PAR-4, binding to PML, binding to a polypeptide found in PML-NBs, localization to PML-NBs, targeting a THAP-family target protein to PML-NBs, and inducing apoptosis;

[0161] wherein a determination that said compound selectively inhibits said at least one biological activity of said polypeptide indicates that said compound is a candidate inhibitor of a THAP-family polypeptide, a candidate inhibitor of apoptosis, or a candidate compound for the treatment of a cell proliferative disorder.

[0162] 69. The method of Paragraphs 67 or 68, wherein step (b) comprises assessing apoptotic activity, and wherein a determination that said compound inhibits apoptosis indicates that said compound is a candidate inhibitor of said THAP-family polypeptide.

[0163] 70. The method of Paragraph 68 comprising introducing a nucleic acid comprising the nucleotide sequence encoding said THAP-family polypeptide according to any one of Paragraphs 32-43 into said cell.

[0164] 71. A polynucleotide according to any one of Paragraphs 17-25 attached to a solid support.

[0165] 72. An array of polynucleotides comprising at least one polynucleotide according to Paragraph 71.

[0166] 73. An array according to Paragraph 72, wherein said array is addressable.

[0167] 74. A polynucleotide according to any one of Paragraphs 17 to 25 further comprising a label.

[0168] 75. A method of identifying a candidate activator of a THAP-family polypeptide, said method comprising:

[0169] a) contacting a THAP-family polypeptide according to SEQ ID NOs: 1-114 or a fragment comprising a a contiguous span of at least 6 contiguous amino acids of a polypeptide according to SEQ ID NOs: 1-114 with a test compound; and

[0170] b) determining whether said compound selectively binds to said polypeptide;

[0171] wherein a determination that said compound selectively binds to said polypeptide indicates that said compound is a candidate activator of said polypeptide.

[0172] 76. A method of identifying a candidate activator of a THAP-family polypeptide of SEQ ID NOs: 1-114 or a fragment comprising a a contiguous span of at least 6 contiguous amino acids of a polypeptide according to SEQ ID NOs: 1-114, said method comprising:

[0173] (a) contacting said polypeptide with a test compound; and

[0174] (b) determining whether said compound selectively activates at least one biological activity selected from the group consisting of interaction with a THAP-family target protein, binding to a nucleic acid sequence, binding to PAR-4, binding to PML, binding to a polypeptide found in PML-NBs, localization to PML-NBs, targeting a THAP-family target protein to PML-NBs, and inducing apoptosis;

[0175] wherein a determination that said compound selectively activates said at least one biological activity of said polypeptide indicates that said compound is a candidate activator of said polypeptide.

[0176] 77. A method of identifying a candidate activator of a THAP-family polypeptide of SEQ ID NOs: 1-114 or, a fragment comprising a a contiguous span of at least 6 contiguous amino acids of a polypeptide according to SEQ ID NOs: 1-114, said method comprising:

[0177] (a) contacting a cell comprising said THAP-family polypeptide with a test compound; and

[0178] (b) determining whether said compound selectively activates at least one biological activity selected from the group consisting of interaction with a THAP-family target protein, binding to a nucleic acid sequence, binding to PAR-4, binding to PML, binding to a polypeptide found in PML-NBs, localization to PML-NBs, targeting a THAP-family target protein to PML-NBs, and inducing apoptosis;

[0179] wherein a determination that said compound selectively activates said at least one biological activity of said polypeptide indicates that said compound is a candidate activator of said polypeptide.

[0180] 78. The method of Paragraphs 76 or 77, wherein said determining step comprises assessing apoptotic activity, and wherein a determination that said compound increases apoptosis activity indicates that said compound is a candidate activator of said THAP-family polypeptide.

[0181] 79. The method of Paragraph 77 wherein step a) comprises introducing a nucleic acid comprising the nucleotide sequence encoding said THAP-family polypeptide according to any one of Paragraphs 17-25 into said cell.

[0182] 80. A method of identifying a candidate modulator of PAR4 activity, said method comprising:

[0183] (a) providing a PAR4 polypeptide or a fragment thereof; and

[0184] (b) providing a PML-NB polypeptide, or a polypeptide associated with PML-NBs, or a fragment thereof; and

[0185] (c) determining whether a test compound selectively modulates the ability of said PAR4 polypeptide to bind to said PML-NB polypeptide or polypeptide associated with PML-NBs;

[0186] wherein a determination that said test compound selectively inhibits the ability of said PAR4 polypeptide to bind to said PML-NB polypeptide or polypeptide associated with PML-NBs indicates that said compound is a candidate modulator of PAR4 activity.

[0187] 81. A method of identifying a candidate modulator of PAR4 activity, said method comprising:

[0188] (a) providing a PAR4 polypeptide or a fragment thereof, and

[0189] (b) determining whether a test compound selectively modulates the ability of said PAR4 polypeptide to localise in PML-NBs;

[0190] wherein a determination that said test compound selectively inhibits the ability of said PAR4 polypeptide to localise in PML-NBs indicates that said compound is a candidate modulator of PAR4 activity.

[0191] 82. A method of identifying a candidate inhibitor of THAP-family activity, said method comprising:

[0192] (a) providing a THAP-family polypeptide of SEQ ID NOs: 1-114 or, a fragment comprising a a contiguous span of at least 6 contiguous amino acids of a polypeptide according to SEQ ID NOs: 1-114; and

[0193] (b) providing a THAP-family target polypeptide or a fragment thereof; and

[0194] (c) determining whether a test compound selectively inhibits the ability of said THAP-family polypeptide to bind to said THAP-family target polypeptide;

[0195] wherein a determination that said test compound selectively inhibits the ability of said THAP-family polypeptide to bind to said THAP-family target polypeptide indicates that said compound is a candidate inhibitor of THAP-family activity.

[0196] 83. The method of Paragraph 82, comprising providing a cell comprising:

[0197] (a) a first expression vector comprising a nucleic acid encoding a THAP-family polypeptide of SEQ ID NOs: 1-114 or, a fragment comprising a a contiguous span of at least 6 contiguous amino acids of a polypeptide according to SEQ ID NOs: 1-114; and

[0198] (b) a second expression vector comprising a nucleic acid encoding a THAP-family target polypeptide, or a fragment thereof.

[0199] 84. The method of Paragraph 82, wherein said THAP-family activity is apoptosis activity.

[0200] 85. The method of Paragraph 82, wherein said THAP-family target protein is PAR-4.

[0201] 86. The method of Paragraph 82, wherein said THAP-family polypeptide is a THAP-1, THAP-2 or THAP-3 protein and said THAP-family target protein is PAR-4.

[0202] 87. A method of modulating apoptosis in a cell comprising modulating the activity of a THAP-family protein.

[0203] 88. The method of Paragraph 87, wherein said THAP-family protein is selected from the group consisting of SEQ ID NOs. 1-114.

[0204] 89. A method of modulating apoptosis in a cell comprising modulating the recruitment of PAR-4 to a PML nuclear body.

[0205] 90. The method of Paragraph 89 wherein modulating the activity of a THAP-family protein comprises modulating the interaction of a THAP-family protein and a THAP-family target protein.

[0206] 91. The method of Paragraph 89 wherein modulating the activity of a THAP-family protein comprises modulating the interaction of a THAP-family protein and a PAR4 protein.

[0207] 92. The method of Paragraph 91 comprising modulation the interaction between a THAP-1, THAP-2, or THAP-3 protein and a PAR-4 protein.

[0208] 93. A method of modulating the recruitment of PAR-4 to a PML nuclear body comprising modulating the interaction of said PAR-4 protein and a THAP-family protein.

[0209] 94. The method of Paragraph 93, wherein said THAP-family protein is selected from the group consisting of SEQ ID NOs. 1-114.

[0210] 95. A method of modulating angiogenesis in an individual comprising modulating the activity of a THAP-family protein in said individual.

[0211] 96. The method of Paragraph 95, wherein said THAP-family protein is selected from the group consisting of SEQ ID NOs. 1-114.

[0212] 97. A method of preventing cell death in an individual comprising inhibiting the activity of a THAP-family protein in said individual.

[0213] 98. The method of Paragraph 97, wherein said THAP-family protein is selected from the group consisting of SEQ ID NOs. 1-114.

[0214] 99. The method according to Paragraph 97, wherein the activity of said THAP-family protein is inhibited in the CNS.

[0215] 100. A method of inducing angiogenesis in an individual comprising inhibiting the activity of a THAP-family protein in said individual.

[0216] 101. The method of Paragraph 100, wherein said THAP-family protein is selected from the group consisting of SEQ ID NOs. 1-114.

[0217] 102. A method according to Paragraph 100, wherein the activity of said THAP-family protein is inhibited in endothelial cells.

[0218] 103. A method of inhibiting angiogenesis or treating cancer in an individual comprising increasing the activity of a THAP-family protein in said individual.

[0219] 104. The method of Paragraph 103, wherein said THAP-family protein is selected from the group consisting of SEQ ID NOs. 1-114.

[0220] 105. A method of treating inflammation or an inflammatory disorder in an individual comprising increasing the activity of a THAP-family protein in said individual.

[0221] 106. The method of Paragraph 105, wherein said THAP-family protein is selected from the group consisting of SEQ ID NOs. 1-114.

[0222] 107. A method according to Paragraphs 103 or 105, wherein the activity of said THAP-family protein is increased in endothelial cells.

[0223] 108. A method of treating cancer in an individual comprising increasing the activity of a THAP-family protein in said individual.

[0224] 109. The method of Paragraph 108, wherein said THAP-family protein is selected from the group consisting of SEQ ID NOs. 1-114.

[0225] 110. The method of Paragraph 108, wherein increasing the activity of said THAP family protein induces apoptosis, inhibits cell division, inhibits metastatic potential, reduces tumor burden, increases sensitivity to chemotherapy or radiotherapy, kills a cancer cell, inhibits the growth of a cancer cell, kills an endothelial cell, inhibits the growth of an endothelial cell, inhibits angiogenesis, or induces tumor regression.

[0226] 111. A method according to any one of Paragraphs 87-110, comprising contacting said subject with a recombinant vector encoding a THAP-family protein according to any one of Paragraphs 32-43 operably linked to a promoter that functions in said cell.

[0227] 112. The method of Paragraph 111, wherein said promoter functions in an endothelial cell.

[0228] 113. A viral composition comprising a recombinant viral vector encoding a THAP-family protein according to Paragraphs 32-43.

[0229] 114. The composition of Paragraph 113, wherein said recombinant viral vector is an adenoviral, adeno-associated viral, retroviral, herpes viral, papilloma viral, or hepatitus B viral vector.

[0230] 115. A method of obtaining a nucleic acid sequence which is recognized by a THAP-family polypeptide comprising contacting a pool of random nucleic acids with said THAP-family polypeptide or a portion thereof and isolating a complex comprising said THAP-family polypeptide and at least one nucleic acid from said pool.

[0231] 116. The method of Paragraph 115 wherein said pool of nucleic acids are labeled.

[0232] 117. The method of Paragraph 116 wherein said complex is isolated by performing a gel shift analysis.

[0233] 118. A method of identifying a nucleic acid sequence which is recognized by a THAP-family polypeptide comprising:

[0234] (a) incubating a THAP-family polypeptide with a pool of labeled random nucleic acids;

[0235] (b) isolating a complex between said THAP-family polypeptide and at least one nucleic acid from said pool;

[0236] (c) performing an amplification reaction to amplify the at least one nucleic acid present in said complex;

[0237] (d) incubating said at least one amplified nucleic acid with said THAP-family polypeptide;

[0238] (e) isolating a complex between said at least one amplified nucleic acid and said THAP-family polypeptide;

[0239] (f) repeating steps (c), (d) and (e) a plurality of times;

[0240] (g) determining the sequence of said nucleic acid in said complex.

[0241] 119. A method of identifying a compound which inhibits the ability of a THAP-family polypeptide to bind to a nucleic acid comprising incubating a THAP-family polypeptide or a fragment thereof which recognizes a binding site in a nucleic acid with a nucleic acid containing said binding site in the presence or absence of a test compound and determining whether the level of binding of said THAP-family polypeptide to said nucleic acid in the presence of said test compound is less than the level of binding in the absence of said test compound.

[0242] 120. A method of identifying a test compound that modulates THAP-mediated activities comprising:

[0243] contacting a THAP-family polypeptide or a biologically active fragment thereof with a test compound, wherein said THAP-family polypeptide comprises an amino acid sequence having at least 30% amino acid identity to an amino acid sequence of SEQ ID NO: 1; and

[0244] determining whether said test compound selectively modulates the activity of said THAP-family polypeptide or biologically active fragment thereof, wherein a determination that said test compound selectively modulates the activity of said polypeptide indicates that said test compound is a candidate modulator of THAP-mediated activities.

[0245] 121. The method of Paragraph 120, wherein the THAP-family polypeptide comprises the amino acid sequence of SEQ ID NO: 1, or a biologically active fragment thereof.

[0246] 122. The method of Paragraph 120, wherein the THAP-family polypeptide comprises the amino acid sequence of SEQ ID NO: 2, or a biologically active fragment thereof.

[0247] 123. The method of Paragraph 120, wherein the THAP-family polypeptide comprises the amino acid sequence of SEQ ID NO: 3, or a biologically active fragment thereof.

[0248] 124. The method of Paragraph 120, wherein the THAP-family polypeptide comprises the amino acid sequence of SEQ ID NO: 4, or a biologically active fragment thereof.

[0249] 125. The method of Paragraph 120, wherein the THAP-family polypeptide comprises the amino acid sequence of SEQ ID NO: 5, or a biologically active fragment thereof.

[0250] 126. The method of Paragraph 120, wherein the THAP-family polypeptide comprises the amino acid sequence of SEQ ID NO: 6, or a biologically active fragment thereof.

[0251] 127. The method of Paragraph 120, wherein the THAP-family polypeptide comprises the amino acid sequence of SEQ ID NO: 7, or a biologically active fragment thereof.

[0252] 128. The method of Paragraph 120, wherein the THAP-family polypeptide comprises the amino acid sequence of SEQ ID NO: 8, or a biologically active fragment thereof.

[0253] 129. The method of Paragraph 120, wherein the THAP-family polypeptide comprises the amino acid sequence of SEQ ID NO: 9, or a biologically active fragment thereof.

[0254] 130. The method of Paragraph 120, wherein the THAP-family polypeptide comprises the amino acid sequence of SEQ ID NO: 10, or a biologically active fragment thereof.

[0255] 131. The method of Paragraph 120, wherein the THAP-family polypeptide comprises the amino acid sequence of SEQ ID NO: 11, or a biologically active fragment thereof.

[0256] 132. The method of Paragraph 120, wherein the THAP-family polypeptide comprises the amino acid sequence of SEQ ID NO: 12, or a biologically active fragment thereof.

[0257] 133. The method of Paragraph 120, wherein the THAP-family polypeptide comprises the amino acid sequence of SEQ ID NO: 13, or a biologically active fragment thereof.

[0258] 134. The method of Paragraph 120, wherein the THAP-family polypeptide comprises the amino acid sequence of SEQ ID NO: 14 or a biologically active fragments thereof.

[0259] 135. The method of Paragraph 120, wherein the THAP-family polypeptide comprises the amino acid sequence selected from the group consisting of SEQ ID NOs: 15-114 or a biologically active fragments thereof.

[0260] 136. The method of Paragraph 120, wherein said THAP-mediated activity is selected from the group consisting of interaction with a THAP-family target protein, binding to a nucleic acid, binding to PAR-4, binding to SLC, binding to PML, binding to a polypeptide found in PML-NBs, localization to PML-NBs, targeting a THAP-family target protein to PML-NBs, and inducing apoptosis

[0261] 137. The method of Paragraph 136, wherein said THAP-mediated activity is binding to PAR-4.

[0262] 138. The method of Paragraph 136, wherein said THAP-mediated activity is binding to SLC.

[0263] 139. The method of Paragraph 136, wherein said THAP-mediated activity is inducing apoptosis.

[0264] 140. The method of Paragraph 136, wherein said nucleic acid comprises a nucleotide sequence selected from the group consisting of SEQ ID NOs: 140-159.

[0265] 141. The method of Paragraph 120, wherein said amino acid identity is determined using an algorithm selected from the group consisting of XBLAST with the parameters, score=50 and wordlength=3, Gapped BLAST with the default parameters of XBLAST, and BLAST with the defaul parameters of XBLAST.

[0266] 142. An isolated or purified THAP domain polypeptide consisting essentially of an amino acid sequence selected from the group consisting of SEQ ID NOs: 1-2, amino acids 1-89 of SEQ ID NOs: 3-5, amino acids 1-90 of SEQ ID NOs: 6-9, amino acids 1-92 of SEQ ID NO: 10, amino acids 1-90 of SEQ ID NOs: 11-14 and homologs having at least 30% amino acid identity to any aforementioned sequence, wherein said polypeptide binds to a nucleic acid.

[0267] 143. The isolated or purified THAP domain polypeptide of Paragraph 142 consisting essentially of SEQ ID NO: 1.

[0268] 144. The isolated or purified THAP domain polypeptide of Paragraph 142, wherein said amino acid identity is determined using an algorithm selected from the group consisting of XBLAST with the parameters, score=50 and wordlength=3, Gapped BLAST with the default parameters of XBLAST, and BLAST with the defaul parameters of XBLAST.

[0269] 145. The isolated or purified THAP domain polypeptide of Paragraph 142, wherein said nucleic acid comprises a nucleotide sequence selected from the group consisting of SEQ ID NOs: 140-159.

[0270] 146. An isolated or purified nucleic acid which encodes the THAP domain polypeptide of Paragraph 142 or a complement thereof.

[0271] 147. An isolated or purified PAR4-binding domain polypeptide consisting essentially of an amino acid sequence selected from the group consisting of amino acids 143-192 of SEQ ID NO: 3, amino acids 132-181 of SEQ ID NO: 4, amino acids 186-234 of SEQ ID NO: 5, SEQ ID NO: 15 and homologs having at least 30% amino acid identity to any aforementioned sequence, wherein said polypeptide binds to PAR4.

[0272] 148. The isolated or purified PAR4-binding domain of Paragraph 147 consisting essentially of SEQ ID NO: 15.

[0273] 149. The isolated or purified PAR4-binding domain of Paragraph 147 consisting essentially of amino acids 143-193 of SEQ ID NO: 3.

[0274] 150. The isolated or purified PAR4-binding domain of Paragraph 147 consisting essentially of amino acids 132-181 of SEQ ID NO: 4.

[0275] 151. The isolated or purified PAR4-binding domain of Paragraph 147 consisting essentially of amino acids 186-234 of SEQ ID NO: 5.

[0276] 152. The isolated or purified PAR4-binding domain polypeptide of Paragraph 147, wherein said amino acid identity is determined using an algorithm selected from the group consisting of XBLAST with the parameters, score=50 and wordlength=3, Gapped BLAST with the default parameters of XBLAST, and BLAST with the defaul parameters of XBLAST.

[0277] 153. An isolated or purified nucleic acid which encodes the PAR4-binding domain polypeptide of Paragraph 147 or a complement thereof.

[0278] 154. An isolated or purified SLC-binding domain polypeptide consisting essentially of an amino acid sequence selected from the group consisting of amino acids 143-213 of SEQ ID NO: 3 and homologs thereof having at least 30% amino acid identity, wherein said polypeptide binds to SLC.

[0279] 155. The isolated or purified SLC-binding domain polypeptide of Paragraph 154, wherein said amino acid identity is determined using an algorithm selected from the group consisting of XBLAST with the parameters, score=50 and wordlength=3, Gapped BLAST with the default parameters of XBLAST, and BLAST with the defaul parameters of XBLAST.

[0280] 156. An isolated or purified nucleic acid which encodes the SLC-binding domain polypeptide of Paragraph 154 or a complement thereof.

[0281] 157. A fusion protein comprising an Fc region of an immunoglobulin fused to a polypeptide comprising an amino acid sequence selected from the group consisting of amino acids 143-213 of SEQ ID NO: 3 and homologs thereof having at least 30% amino acid identity.

[0282] 158. An oligomeric THAP protein comprising a plurality of THAP polypeptides, wherein each THAP polypeptide comprises an amino acid sequence selected from the group consisting of amino acid 143-213 of SEQ ID NO: 3 and homologs thereof having at least 30% amino acid identity.

[0283] 159. A medicament comprising an effective amount of a THAP1 polypeptide or an SLC-binding fragment thereof, together with a pharmaceutically acceptable carrier.

[0284] 160. An isolated or purified THAP dimerization domain polypeptide consisting essentially of an amino acid sequence selected from the group consisting of amino acids 143 and 192 of SEQ ID NO: 3 and homologs thereof having at least 30% amino acid identity, wherein said polypeptide binds to a THAP-family polypeptide.

[0285] 161. The isolated or purified THAP dimerization domain polypeptide of Paragraph 160, wherein said amino acid identity is determined using an algorithm selected from the group consisting of XBLAST with the parameters, score=50 and wordlength=3, Gapped BLAST with the default parameters of XBLAST, and BLAST with the defaul parameters of XBLAST.

[0286] 162. An isolated or purified nucleic acid which encodes the THAP dimerization domain polypeptide of Paragraph 160 or a complement thereof.

[0287] 163. An expression vector comprising a promoter operably linked to a nucleic acid having a nucleotide sequence selected from the group consisting of SEQ ID NOs: 160-175 and portions thereof comprising at least 18 consecutive nucleotides.

[0288] 164. The expression vector of Paragraph 163, wherein said promoter is a promoter which is not operably linked to said nucleic acid selected from the group consisting of SEQ ID NOs.: 160-175 in a naturally occurring genome.

[0289] 165. A host cell comprising the expression vector of Paragraph 163.

[0290] 166. An expression vector comprising a promoter operably linked to a nucleic acid encoding a polypeptide comprising an amino acid sequence selected from the group consisting of SEQ ID NOs: 1-114 and portions thereof comprising at least 18 consecutive nucleotides.

[0291] 167. The expression vector of Paragraph 166, wherein said promoter is a promoter which is not operably linked to said nucleic acid selected from the group consisting of SEQ ID NOs.: 160-175 in a naturally occurring genome.

[0292] 168. A host cell comprising the expression vector of Paragraph 166.

[0293] 169. A method of identifying a candidate inhibitor of a THAP-family polypeptide, a candidate inhibitor of apoptosis, or a candidate compound for the treatment of a cell proliferative disorder, said method comprising:

[0294] contacting a THAP-family polypeptide comprising an amino acid sequence selected from the group consisting of SEQ ID NOs: 1-114 or a fragment comprising a span of at least 6 contiguous amino acids of a polypeptide comprising an amino acid sequence selected from the group consisting of SEQ ID NOs: 1-114 with a test compound; and

[0295] determining whether said compound selectively binds to said polypeptide, wherein a determination that said compound selectively binds to said polypeptide indicates that said compound is a candidate inhibitor of a THAP-family polypeptide, a candidate inhibitor of apoptosis, or a candidate compound for the treatment of a cell proliferative disorder.

[0296] 170. A method of identifying a candidate inhibitor of apoptosis, a candidate compound for the treatment of a cell proliferative disorder, or a candidate inhibitor of a THAP-family polypeptide of SEQ ID NOs: 1-114 or a fragment comprising a span of at least 6 contiguous amino acids of a polypeptide according to SEQ ID NOs: 1-114, said method comprising:

[0297] contacting said THAP-family polypeptide with a test compound; and

[0298] determining whether said compound selectively inhibits at least one biological activity selected from the group consisting of interaction with a THAP-family target protein, binding to a nucleic acid sequence, binding to PAR-4, binding to SLC, binding to PML, binding to a polypeptide found in PML-NBs, localization to PML-NBs, targeting a THAP-family target protein to PML-NBs, and inducing apoptosis, wherein a determination that said compound selectively inhibits said at least one biological activity of said polypeptide indicates that said compound is a candidate inhibitor of a THAP-family polypeptide, a candidate inhibitor of apoptosis, or a candidate compound for the treatment of a cell proliferative disorder.

[0299] 171. A method of identifying a candidate inhibitor of apoptosis, a candidate compound for the treatment of a cell proliferative disorder, or a candidate inhibitor of a THAP-family polypeptide of SEQ ID NOs: 1-114 or a fragment comprising a span of at least 6 contiguous amino acids of a polypeptide according to SEQ ID NOs: 1-114, said method comprising:

[0300] contacting a cell comprising said THAP-family polypeptide with a test compound; and

[0301] determining whether said compound selectively inhibits at least one biological activity selected from the group consisting of interaction with a THAP-family target protein, binding to a nucleic acid sequence, binding to PAR-4, binding to SLC, binding to PML, binding to a polypeptide found in PML-NBs, localization to PML-NBs, targeting a THAP-family target protein to PML-NBs, and inducing apoptosis, wherein a determination that said compound selectively inhibits said at least one biological activity of said polypeptide indicates that said compound is a candidate inhibitor of a THAP-family polypeptide, a candidate inhibitor of apoptosis, or a candidate compound for the treatment of a cell proliferative disorder.

[0302] 172. A method of identifying a candidate modulator of THAP-family activity, said method comprising:

[0303] providing a THAP-family polypeptide of SEQ ID NOs: 1-114 or, a fragment comprising a span of at least 6 contiguous amino acids of a polypeptide according to SEQ ID NOs: 1-114; and

[0304] providing a THAP-family target polypeptide or a fragment thereof; and

[0305] determining whether a test compound selectively modulates the ability of said THAP-family polypeptide to bind to said THAP-family target polypeptide, wherein a determination that said test compound selectively modulates the ability of said THAP-family polypeptide to bind to said THAP-family target polypeptide indicates that said compound is a candidate modulator of THAP-family activity.

[0306] 173. The method of Paragraph 172, wherein said THAP-family polypeptide is provided by a first expression vector comprising a nucleic acid encoding a THAP-family polypeptide of SEQ ID NOs: 1-114 or, a fragment comprising a contiguous span of at least 6 contiguous amino acids of a polypeptide according to SEQ ID NOs: 1-114, and wherein said THAP-family target polypeptide is provided by a second expression vector comprising a nucleic acid encoding a THAP-family target polypeptide, or a fragment thereof.

[0307] 174. The method of Paragraph 172, wherein said THAP-family activity is apoptosis activity.

[0308] 175. The method of Paragraph 172, wherein said THAP-family target protein is PAR-4.

[0309] 176. The method of Paragraph 172, wherein said THAP-family polypeptide is a THAP-1, THAP-2 or THAP-3 protein and said THAP-family target protein is PAR-4.

[0310] 177. The method of Paragraph 172, wherein said THAP-family target protein is SLC.

[0311] 178. A method of modulating apoptosis in a cell comprising modulating the activity of a THAP-family protein.

[0312] 179. The method of Paragraph 178, wherein said THAP-family protein is selected from the group consisting of SEQ ID NOs: 1-114.

[0313] 180. The method of Paragraph 178, wherein modulating the activity of a THAP-family protein comprises modulating the interaction of a THAP-family protein and a THAP-family target protein.

[0314] 181. The method of Paragraph 178, wherein modulating the activity of a THAP-family protein comprises modulating the interaction of a THAP-family protein and a PAR4 protein.

[0315] 182. A method of identifying a candidate activator of a THAP-family polypeptide, a candidate activator of apoptosis, or a candidate compound for the treatment of a cell proliferative disorder, said method comprising:

[0316] contacting a THAP-family polypeptide comprising an amino acid sequence selected from the group consisting of SEQ ID NOs: 1-98 or a fragment comprising a span of at least 6 contiguous amino acids of a polypeptide comprising an amino acid sequence selected from the group consisting of SEQ ID NOs: 1-98 with a test compound; and

[0317] determining whether said compound selectively binds to said polypeptide, wherein a determination that said compound selectively binds to said polypeptide indicates that said compound is a candidate activator of a THAP-family polypeptide, a candidate activator of apoptosis, or a candidate compound for the treatment of a cell proliferative disorder.

[0318] 183. A method of identifying a candidate activator of apoptosis, a candidate compound for the treatment of a cell proliferative disorder, or a candidate activator of a THAP-family polypeptide of SEQ ID NOs: 1-98 or a fragment comprising a span of at least 6 contiguous amino acids of a polypeptide according to SEQ ID NOs: 1-98, said method comprising:

[0319] contacting said THAP-family polypeptide with a test compound; and

[0320] determining whether said compound selectively activates at least one biological activity selected from the group consisting of interaction with a THAP-family target protein, binding to a nucleic acid sequence, binding to PAR-4, binding to SLC, binding to PML, binding to a polypeptide found in PML-NBs, localization to PML-NBs, targeting a THAP-family target protein to PML-NBs, and inducing apoptosis, wherein a determination that said compound selectively activates said at least one biological activity of said polypeptide indicates that said compound is a candidate activator of a THAP-family polypeptide, a candidate activator of apoptosis, or a candidate compound for the treatment of a cell proliferative disorder.

[0321] 184. A method of identifying a candidate activator of apoptosis, a candidate compound for the treatment of a cell proliferative disorder, or a candidate activator of a THAP-family polypeptide of SEQ ID NOs: 1 to 98 or a fragment comprising a span of at least 6 contiguous amino acids of a polypeptide according to SEQ ID NOs: 1-98, said method comprising:

[0322] contacting a cell comprising said THAP-family polypeptide with a test compound; and

[0323] determining whether said compound selectively activates at least one biological activity selected from the group consisting of interaction with a THAP-family target protein, binding to a nucleic acid sequence, binding to PAR-4, binding to SLC, binding to PML, binding to a polypeptide found in PML-NBs, localization to PML-NBs, targeting a THAP-family target protein to PML-NBs, and inducing apoptosis, wherein a determination that said compound selectively activates said at least one biological activity of said polypeptide indicates that said compound is a candidate activator of a THAP-family polypeptide, a candidate activator of apoptosis, or a candidate compound for the treatment of a cell proliferative disorder.

[0324] 185. A method of ameliorating a condition associated with the activity of SLC in an individual comprising administering a polypeptide comprising the SLC binding domain of a THAP-family protein to said individual.

[0325] 186. The method of Paragraph 185, wherein said polypeptide comprises a fusion protein comprising an Fc region of an immunoglobulin fused to a polypeptide comprising an amino acid sequence selected from the group consisting of amino acids 143-213 of SEQ ID NO: 3 and homologs thereof having at least 30% amino acid identity.

[0326] 187. The method of Paragraph 185, wherein said polypeptide comprises an oligomeric THAP protein comprising a plurality of THAP polypeptides, wherein each THAP polypeptide comprises an amino acid sequence selected from the group consisting of amino acid 143-213 of SEQ ID NO: 3 and homologs thereof having at least 30% amino acid identity.

[0327] 188. A method of modulating angiogenesis in an individual comprising modulating the activity of a THAP-family protein in said individual.

[0328] 189. The method of Paragraph 188, wherein said THAP-family protein is selected from the group consisting of SEQ ID NOs: 1-114.

[0329] 190. The method of Paragraph 188, wherein said modulation is inhibition.

[0330] 191. The method of Paragraph 188, wherein said modulation is induction.

[0331] 192. A method of reducing cell death in an individual comprising inhibiting the activity of a THAP-family protein in said individual.

[0332] 193. The method of Paragraph 192, wherein said THAP-family protein is selected from the group consisting of SEQ ID NOs: 1-114.

[0333] 194. The method according to Paragraph 192, wherein the activity of said THAP-family protein is inhibited in the CNS.

[0334] 195. A method of reducing inflammation or an inflammatory disorder in an individual comprising modulating the activity of a THAP-family protein in said individual.

[0335] 196. The method of Paragraph 195, wherein said THAP-family protein is selected from the group consisting of SEQ ID NOs: 1-114.

[0336] 197. A method of reducing the extent of cancer in an individual comprising modulating the activity of a THAP-family protein in said individual.

[0337] 198. The method of Paragraph 197, wherein said THAP-family protein is selected from the group consisting of SEQ ID NOs: 1-114.

[0338] 199. The method of Paragraph 197, wherein increasing the activity of said THAP family protein induces apoptosis, inhibits cell division, inhibits metastatic potential, reduces tumor burden, increases sensitivity to chemotherapy or radiotherapy, kills a cancer cell, inhibits the growth of a cancer cell, kills an endothelial cell, inhibits the growth of an endothelial cell, inhibits angiogenesis, or induces tumor regression.

[0339] 200. A method of forming a complex, said method comprising:

[0340] contacting a chemokine with a chemokine-binding agent comprising a polypeptide selected from the group consisting of THAP-1, a polypeptide having at least 30% amino acid identity to THAP-1, a chemokine-binding domain of THAP-1 and a polypeptide having at least 30% amino acid identity to a chemokine-binding domain of THAP-1, wherein said chemokine and said chemokine binding agent form a complex.

[0341] 201. The method of Paragraph 200, wherein said amino acid identity is determined using an algorithm selected from the group consisting of XBLAST with the parameters, score=50 and wordlength=3, Gapped BLAST with the default parameters of XBLAST, and BLAST with the defaul parameters of XBLAST.

[0342] 202. The method of Paragraph 200, wherein said polypeptide is fused to an Fc region of an immunoglobulin.

[0343] 203. The method of Paragraph 200, wherein said polypeptide comprises a THAP dimerization domain.

[0344] 204. The method of Paragraph 203, wherein said THAP dimerization domain interacts with one or more THAP dimerization domains to form a THAP oligomer.

[0345] 205. The method of Paragraph 200, wherein said polypeptide is a recombinant polypeptide.

[0346] 206. The method of Paragraph 200, wherein said chemokine is selected from the group consisting of SLC, CCL19, CCL5, CXCL9 and CXCL10.

[0347] 207. The method of Paragraph 200, wherein said chemokine is selected from the group consisting of SLC, CCL19 and CXCL9.

[0348] 208. The method of Paragraph 200, wherein said polypeptide comprises THAP-1.

[0349] 209. The method of Paragraph 208, wherein said THAP-1 comprises the amino acid sequence of SEQ ID NO: 3.

[0350] 210. The method of Paragraph 200, wherein said polypeptide comprises a polypeptide having at least 30% amino acid identity to THAP-1.

[0351] 211. The method of Paragraph 200, wherein said polypeptide comprises a chemokine-binding domain of THAP-1.

[0352] 212. The method of Paragraph 211, wherein said chemokine-binding domain of THAP-1 comprises the amino acid sequence of amino acids 143-213 of SEQ ID NO: 3.

[0353] 213. The method of Paragraph 200, wherein said polypeptide comprises a polypeptide having at least 30% amino acid identity to a chemokine-binding domain of THAP-1.

[0354] 214. A method of inhibiting the activity of a chemokine, said method comprising contacting a chemokine with an effective amount of an agent comprising a polypeptide selected from the group consisting of THAP-1, a polypeptide having at least 30% amino acid identity to THAP-1, a chemokine-binding domain of THAP-1 and a polypeptide having at least 30% amino acid identity to a chemokine-binding domain of THAP-1, wherein the activity of said chemokine is inhibited.

[0355] 215. The method of Paragraph 214, wherein said amino acid identity is determined using an algorithm selected from the group consisting of XBLAST with the parameters, score=50 and wordlength=3, Gapped BLAST with the default parameters of XBLAST, and BLAST with the defaul parameters of XBLAST.

[0356] 216. The method of Paragraph 214, wherein said polypeptide is fused to an Fc region of an immunoglobulin.

[0357] 217. The method of Paragraph 214, wherein said polypeptide comprises a THAP dimerization domain.

[0358] 218. The method of Paragraph 217, wherein said THAP dimerization domain interacts with one or more THAP dimerization domains to form a THAP oligomer.

[0359] 219. The method of Paragraph 214, wherein said polypeptide is a recombinant polypeptide.

[0360] 220. The method of Paragraph 214, wherein said polypeptide binds to a chemokine selected from the group consisting of SLC, CCL19, CCL5, CXCL9 and CXCL10.

[0361] 221. The method of Paragraph 214, wherein said polypeptide binds to a chemokine selected from the group consisting of SLC, CCL19 and CXCL9.

[0362] 222. The method of Paragraph 214, wherein said polypeptide comprises THAP-1.

[0363] 223. The method of Paragraph 222, wherein said THAP-1 comprises the amino acid sequence of SEQ ID NO: 3.

[0364] 224. The method of Paragraph 214, wherein said polypeptide comprises a polypeptide having at least 30% amino acid identity to THAP-1.

[0365] 225. The method of Paragraph 214, wherein said polypeptide comprises a chemokine-binding domain of THAP-1.

[0366] 226. The method of Paragraph 225, wherein said chemokine-binding domain of THAP-1 comprises the amino acid sequence of amino acids 143-213 of SEQ ID NO: 3.

[0367] 227. The method of Paragraph 214, wherein said polypeptide comprises a polypeptide having at least 30% amino acid identity to a chemokine-binding domain of THAP-1.

[0368] 228. A method of reducing inflammation comprising administering an effective amount of a chemokine binding agent to a subject afflicted with an inflammatory condition, wherein said chemokine-binding agent comprises a polypeptide selected from the group consisting of THAP-1, a polypeptide having at least 30% amino acid identity to THAP-1, a chemokine-binding domain of THAP-1 and a polypeptide having at least 30% amino acid identity to a chemokine-binding domain of THAP-1.

[0369] 229. The method of Paragraph 228, wherein said amino acid identity is determined using an algorithm selected from the group consisting of XBLAST with the parameters, score=50 and wordlength=3, Gapped BLAST with the default parameters of XBLAST, and BLAST with the defaul parameters of XBLAST.

[0370] 230. The method of Paragraph 228, wherein said polypeptide is fused to an Fc region of an immunoglobulin.

[0371] 231. The method of Paragraph 228, wherein said polypeptide comprises a THAP dimerization domain.

[0372] 232. The method of Paragraph 231, wherein said THAP dimerization domain interacts with one or more THAP dimerization domains to form a TRAP oligomer.

[0373] 233. The method of Paragraph 228, wherein said polypeptide is a recombinant polypeptide.

[0374] 234. The method of Paragraph 228, wherein said polypeptide binds to a chemokine selected from the group consisting of SLC, CCL19, CCL5, CXCL9 and CXCL10.

[0375] 235. The method of Paragraph 228, wherein said polypeptide binds to a chemokine selected from the group consisting of SLC, CCL19 and CXCL9.

[0376] 236. The method of Paragraph 228, wherein said polypeptide comprises THAP-1.

[0377] 237. The method of Paragraph 236, wherein said THAP-1 comprises the amino acid sequence of SEQ ID NO: 3.

[0378] 238. The method of Paragraph 228, wherein said polypeptide comprises a polypeptide having at least 30% amino acid identity to THAP-1.

[0379] 239. The method of Paragraph 228, wherein said polypeptide comprises a chemokine-binding domain of THAP-1.

[0380] 240. The method of Paragraph 239, wherein said chemokine-binding domain of THAP-1 comprises the amino acid sequence of amino acids 143-213 of SEQ ID NO: 3.

[0381] 241. The method of Paragraph 228, wherein said polypeptide comprises a polypeptide having at least 30% amino acid identity to a chemokine-binding domain of THAP-1.

[0382] 242. A method of reducing one or more symptoms associated with an inflammatory disease, said method comprising administering to a subject afflicted with said inflammatory disease a therapeutically effective amount of an agent which reduces or eliminates the activity of one or more chemokines, wherein said agent comprises a polypeptide selected from the group consisting of THAP-1, a polypeptide having at least 30% amino acid identity to THAP-1, a chemokine-binding domain of THAP-1 and a polypeptide having at least 30% amino acid identity to a chemokine-binding domain of THAP-1.

[0383] 243. The method of Paragraph 242, wherein said polypeptide is fused to an Fc region of an immunoglobulin.

[0384] 244. The method of Paragraph 242, wherein said polypeptide comprises a THAP dimerization domain.

[0385] 245. The method of Paragraph 244, wherein said THAP dimerization domain interacts with one or more THAP dimerization domains to form a THAP oligomer.

[0386] 246. The method of Paragraph 242, wherein said polypeptide is a recombinant polypeptide.

[0387] 247. The method of Paragraph 242, wherein said polypeptide binds to a chemokine selected from the group consisting of SLC, CCL19, CCL5, CXCL9 and CXCL10.

[0388] 248. The method of Paragraph 242, wherein said polypeptide binds to a chemokine selected from the group consisting of SLC, CCL19 and CXCL9.

[0389] 249. The method of Paragraph 242, wherein said polypeptide comprises THAP-1.

[0390] 250. The method of Paragraph 249, wherein said THAP-1 comprises the amino acid sequence of SEQ ID NO: 3.

[0391] 251. The method of Paragraph 242, wherein said polypeptide comprises a polypeptide having at least 30% amino acid identity to THAP-1.

[0392] 252. The method of Paragraph 242, wherein said polypeptide comprises a chemokine-binding domain of THAP-1.

[0393] 253. The method of Paragraph 252, wherein said chemokine-binding domain of THAP-1 comprises the amino acid sequence of amino acids 143-213 of SEQ ID NO: 3.

[0394] 254. The method of Paragraph 242, wherein said polypeptide comprises a polypeptide having at least 30% amino acid identity to a chemokine-binding domain of THAP-1.

[0395] 255. The method of Paragraph 242, wherein said inflammatory disease is arthritis.

[0396] 256. The method of Paragraph 242, wherein said inflammatory disease is inflammatory bowel disease.

[0397] 257. A method of detecting a chemokine, said method comprising:

[0398] contacting a chemokine with a chemokine-binding agent comprising a polypeptide selected from the group consisting of THAP-1, a polypeptide having at least 30% amino acid identity to THAP-1, a chemokine-binding domain of THAP-1 and a polypeptide having at least 30% amino acid identity to a chemokine-binding domain of THAP-1; and

[0399] detecting chemokine-binding agent bound to said chemokine.

[0400] 258. The method of Paragraph 257, wherein chemokine is selected from the group consisting of SLC, CCL19, CCL5, CXCL9 and CXCL10.

[0401] 259. The method of Paragraph 257, wherein said chemokine is selected from the group consisting of SLC, CCL19 and CXCL9.

[0402] 260. A detection system comprising a chemokine-binding agent comprising a polypeptide selected from the group consisting of THAP-1, a polypeptide having at least 30% amino acid identity to THAP-1, a chemokine-binding domain of THAP-1 and a polypeptide having at least 30% amino acid identity to a chemokine-binding domain of THAP-1, wherein said chemokine-binding agent is coupled to a solid support.

[0403] 261. The detection system of Paragraph 260, wherein said polypeptide comprises THAP-1.

[0404] 262. The detection system of Paragraph 261, wherein said THAP-1 comprises the amino acid sequence of SEQ ID NO: 3.

[0405] 263. The detection system of Paragraph 260, wherein said polypeptide comprises a polypeptide having at least 30% amino acid identity to THAP-1.

[0406] 264. The detection system of Paragraph 260, wherein said polypeptide comprises a chemokine-binding domain of THAP-1.

[0407] 265. The detection system of Paragraph 264, wherein said chemokine-binding domain of THAP-1 comprises the amino acid sequence of amino acids 143-213 of SEQ ID NO: 3.

[0408] 266. The detection system of Paragraph 260, wherein said polypeptide comprises a polypeptide having at least 30% amino acid identity to a chemokine-binding domain of THAP-1.

[0409] 267. A pharmaceutical composition comprising a chemokine-binding agent in a pharaceutically acceptable carrier, wherein said chemokine-binding agent comprises a polypeptide selected from the group consisting of THAP-1, a polypeptide having at least 30% amino acid identity to THAP-1, a chemokine-binding domain of THAP-1 and a polypeptide having at least 30% amino acid identity to a chemokine-binding domain of THAP-1.

[0410] 268. The pharmaceutical composition of Paragraph 267, wherein said amino acid identity is determined using an algorithm selected from the group consisting of XBLAST with the parameters, score=50 and wordlength=3, Gapped BLAST with the default parameters of XBLAST, and BLAST with the defaul parameters of XBLAST.

[0411] 269. The pharmaceutical composition of Paragraph 267, wherein said polypeptide is fused to an Fe region of an immunoglobulin.

[0412] 270. The pharmaceutical composition of Paragraph 267, wherein said polypeptide comprises a THAP dimerization domain.

[0413] 271. The pharmaceutical composition of Paragraph 271, wherein said THAP dimerization domain interacts with one or more THAP dimerization domains to form a THAP oligomer.

[0414] 272. The pharmaceutical composition of Paragraph 267, wherein said polypeptide binds to a chemokine selected from the group consisting of SLC, CCL19, CCL5, CXCL9 and CXCL10.

[0415] 273. The pharmaceutical composition of Paragraph 267, wherein said polypeptide binds to a chemokine selected from the group consisting of SLC, CCL19 and CXCL9.

[0416] 274. The pharmaceutical composition of Paragraph 267, wherein said polypeptide comprises THAP-1.

[0417] 275. The pharmaceutical composition of Paragraph 274, wherein said THAP-1 comprises the amino acid sequence of SEQ ID NO: 3.

[0418] 276. The pharmaceutical composition of Paragraph 267, wherein said polypeptide comprises a polypeptide having at least 30% amino acid identity to THAP-1.

[0419] 277. The pharmaceutical composition of Paragraph 267, wherein said polypeptide comprises a chemokine-binding domain of THAP-1.

[0420] 278. The pharmaceutical composition of Paragraph 277, wherein said chemokine-binding domain of THAP-1 comprises the amino acid sequence of amino acids 143-213 of SEQ ID NO: 3.

[0421] 279. The pharmaceutical composition of Paragraph 267, wherein said polypeptide comprises a polypeptide having at least 30% amino acid identity to a chemokine-binding domain of THAP-1.

[0422] 280. A device for administering an agent, said device comprising a container that contains therein a chemokine-binding agent in a pharmaceutically acceptable carrier, wherein said chemokine-binding agent comprises a polypeptide selected from the group consisting of THAP-1, a polypeptide having at least 30% amino acid identity to THAP-1, a chemokine-binding domain of THAP-1 and a polypeptide having at least 30% amino acid identity to a chemokine-binding domain of THAP-1.

[0423] 281. The device according to Paragraph 280, wherein said container is a syringe.

[0424] 282. The device according to Paragraph 280, wherein said container is a patch for transdermal administration.

[0425] 283. The device according to Paragraph 280, wherein said container is pressurized canister.

[0426] 284. A kit comprising:

[0427] a chemokine-binding agent comprising a polypeptide selected from the group consisting of THAP-1, a polypeptide having at least 30% amino acid identity to THAP-1, a chemokine-binding domain of THAP-1 and a polypeptide having at least 30% amino acid identity to a chemokine-binding domain of THAP-1; and

[0428] instructions for using said chemokine-binding agent for detecting or inhibiting chemokines.

[0429] 285. The kit of Paragraph 284, wherein said chemokine is selected from the group consisting of SLC, CCL19, CCL5, CXCL9 and CXCL10.

[0430] 286. An isolated or purified chemokine-binding domain consisting essentially of a portion of SEQ ID NO: 3 that binds to a chemokine.

[0431] 287. The isolated or purified chemokine-binding domain of Paragraph 286, wherein said chemokine is CCL19.

[0432] 288. The isolated or purified chemokine-binding domain of Paragraph 286, wherein said chemokine is CCL5.

[0433] 289. The isolated or purified chemokine-binding domain of Paragraph 286, wherein said chemokine is CXCL9.

[0434] 290. The isolated or purified chemokine-binding domain of Paragraph 286, wherein said chemokine is CXCL10.

[0435] 291. A method of modulating expression of a THAP responsive gene, said method comprising modulating the interaction of a THAP-family polypeptide or a biologically active fragment thereof with a nucleic acid, thereby enhancing or repressing expression of said THAP responsive gene.

[0436] 292. The method of Paragraph 291, wherein said THAP-family polypeptide is THAP1.

[0437] 293. The method of Paragraph 291, wherein said nucleic acid is a THAP responsive promoter.

[0438] 294. The method of Paragraph 293, wherein said THAP responsive promoter comprises a THAP responsive element.

[0439] 295. The method of Paragraph 294, wherein said THAP responsive element is a DR-5 element.

[0440] 296. The method of Paragraph 294, wherein said THAP responsive element is an ER-11 element.

[0441] 297. The method of Paragraph 294, wherein said THAP responsive element is THRE.

[0442] 298. The method of Paragraph 293, wherein said THAP responsive promoter does not comprise a THAP responsive element.

[0443] 299. The method of Paragraph 298, wherein said THAP responsive promoter is modulated by a product of a gene that is under the control of a promoter which comprises a THAP responsive element.

[0444] 300. The method of Paragraph 291, wherein said THAP responsive gene is selected from the group consisting of Survivin, PTTG1/Securin, PTTG2/Securin, PTTG3/Securin, CKS1, MAD2L1, USP16/Ubp-M, HMMR/RHAMM, KIAA0008/HURP, CDCA7/JPO1 and THAP1.

[0445] 301. The method of Paragraph 291, wherein said THAP responsive gene encodes a polypeptide involved in the G2 or M phase of the cell cycle.

[0446] 302. The method of Paragraph 291, wherein said THAP responsive gene encodes a polypeptide involved in the S phase of the cell cycle.

[0447] 303. The method of Paragraph 302, wherein said THAP responsive gene encodes a polypeptide involved in DNA replication.

[0448] 304. The method of Paragraph 302, wherein said THAP responsive gene encodes a polypeptide involved in DNA repair.

[0449] 305. The method of Paragraph 291, wherein said THAP responsive gene encodes a polypeptide involved in RNA splicing.

[0450] 306. The method of Paragraph 291, wherein said THAP responsive gene encodes a polypeptide involved in apoptosis.

[0451] 307. The method of Paragraph 291, wherein said THAP responsive gene encodes a polypeptide involved in angiogenesis.

[0452] 308. The method of Paragraph 291, wherein said THAP responsive gene encodes a polypeptide involved in the proliferation of cancer cells.

[0453] 309. The method of Paragraph 291, wherein said THAP responsive gene encodes a polypeptide involved in inflammatory disease.

[0454] 310. A method of modulating the expression of a gene responsive to a THAP/chemokine complex, said method comprising modulating the interaction of a chemokine with a THAP-family polypeptide or a biologically active fragment thereof, thereby enhancing or repressing expression of said gene.

[0455] 311. The method of Paragraph 310, wherein said THAP-family polypeptide is THAP1.

[0456] 312. The method of Paragraph 310, wherein said chemokine is selected from the group consisting of SLC, CCL19, CCL5, CXCL11, CXCL10 and CXCL9.

[0457] 313. The method of Paragraph 310, wherein said chemokine is SLC.

[0458] 314. The method of Paragraph 310, wherein said chemokine is CXCL9.

[0459] 315. The method of Paragraph 310, wherein the interaction between said chemokine and said THAP-family polypeptide is modulated by providing a THAP-type chemokine-binding agent.

[0460] 316. The method of Paragraph 315, wherein said THAP-type chemokine-binding agent comprises a polypeptide selected from the group consisting of a THAP1 polypeptide, an chemokine-binding domain of a THAP1 polypeptide, a THAP1 polypeptide oligomer, an oligomer comprising a THAP1 chemokine-binding domain, a THAP1 polypeptide-immunoglobulin fusion, a THAP1 chemokine-binding domain-immunoglobulin fusion and polypeptide homologs of any one of the aforementioned polypeptides.

[0461] 317. The method of Paragraph 316, wherein said chemokine-binding domain is an SLC-binding domain.

[0462] 318. The method of Paragraph 316, wherein said chemokine-binding domain is a CXCL9-binding domain.

[0463] 319. The method of Paragraph 310, wherein said gene encodes a polypeptide involved in the G2 or M phase of the cell cycle.

[0464] 320. The method of Paragraph 310, wherein said gene encodes a polypeptide involved in the S phase of the cell cycle.

[0465] 321. The method of Paragraph 310, wherein said gene encodes a polypeptide involved in DNA replication.

[0466] 322. The method of Paragraph 310, wherein said gene encodes a polypeptide involved in DNA repair.

[0467] 323. The method of Paragraph 310, wherein said gene encodes a polypeptide involved in RNA splicing.

[0468] 324. The method of Paragraph 310, wherein said gene encodes a polypeptide involved in apoptosis.

[0469] 325. The method of Paragraph 310, wherein said gene encodes a polypeptide involved in angiogenesis.

[0470] 326. The method of Paragraph 310, wherein said gene encodes a polypeptide involved in the proliferation of cancer cells.

[0471] 327. The method of Paragraph 310, wherein said gene encodes a polypeptide involved in inflammatory disease.

[0472] 328. A method of modulating the expression of a gene responsive to a THAP/chemokine complex, said method comprising modulating the interaction of a THAP/chemokine complex with a nucleic acid, thereby enhancing or repressing expression of said gene.

[0473] 329. The method of Paragraph 328, wherein said THAP-family polypeptide is THAP1.

[0474] 330. The method of Paragraph 328, wherein said chemokine is selected from the group consisting of SLC, CCL19, CCL5, CXCL11, CXCL10 and CXCL9.

[0475] 331. The method of Paragraph 328, wherein said chemokine is SLC.

[0476] 332. The method of Paragraph 328, wherein said chemokine is CXCL9.

[0477] 333. The method of Paragraph 328, wherein said gene encodes a polypeptide involved in the G2 or M phase of the cell cycle.

[0478] 334. The method of Paragraph 328, wherein said gene encodes a polypeptide involved in the S phase of the cell cycle.

[0479] 335. The method of Paragraph 334, wherein said gene encodes a polypeptide involved in DNA replication.

[0480] 336. The method of Paragraph 334, wherein said gene encodes a polypeptide involved in DNA repair.

[0481] 337. The method of Paragraph 328, wherein said gene encodes a polypeptide involved in RNA splicing.

[0482] 338. The method of Paragraph 328, wherein said gene encodes a polypeptide involved in apoptosis.

[0483] 339. The method of Paragraph 328, wherein said gene encodes a polypeptide involved in angiogenesis.

[0484] 340. The method of Paragraph 328, wherein said gene encodes a polypeptide involved in the proliferation of cancer cells.

[0485] 341. The method of Paragraph 328, wherein said gene encodes a polypeptide involved in inflammatory disease.

[0486] 342. The method of Paragraph 328, wherein said nucleic acid is a THAP responsive promoter.

[0487] 343. The method of Paragraph 342, wherein said THAP responsive promoter comprises a THAP responsive element.

[0488] 344. The method of Paragraph 343, wherein said THAP responsive element is a DR-S element.

[0489] 345. The method of Paragraph 343, wherein said THAP responsive element is an ER-II element.

[0490] 346. The method of Paragraph 343, wherein said THAP responsive element is THRE.

[0491] 347. The method of Paragraph 342, wherein said THAP responsive promoter does not comprise a THAP responsive element.

[0492] 348. The method of Paragraph 347, wherein said THAP responsive promoter is modulated by a product of a gene that is under the control of a promoter which comprises a THAP responsive element.

[0493] 349. A pharmaceutical composition comprising a THAP responsive element in a pharmaceutically acceptable carrier.

[0494] 350. The pharmaceutical composition of Paragraph 349, wherein said THAP responsive element is a DR-5 element.

[0495] 351. The pharmaceutical composition of Paragraph 349, wherein said THAP responsive element is an ER-11 element.

[0496] 352. The pharmaceutical composition of Paragraph 349, wherein said THAP responsive element is an THRE.

[0497] 353. A transcription factor decoy consisting essentially of a THAP responsive element.

[0498] 354. The transcription factor decoy of Paragraph 353, wherein said THAP responsive element is a DR-5 element.

[0499] 355. The transcription factor decoy of Paragraph 353, wherein said THAP responsive element is a ER-11 element.

[0500] 356. The transcription factor decoy of Paragraph 353, wherein said THAP responsive element is a THRE element.

[0501] 357. A cell comprising a transcription factor decoy of Paragraph 353.

[0502] 358. A method of modulating the interaction between a nucleic acid and a THAP-family polypeptide or a biologically active fragment thereof, said method comprising providing a transcription factor decoy which comprises a THAP responsive element, thereby modulating the interaction between said nucleic acid and said THAP-family polypeptide or a biologically active fragment thereof.

[0503] 359. The method of Paragraph 358, wherein said THAP-family polypeptide is THAP1.

[0504] 360. The method of Paragraph 358, wherein said THAP responsive element is a DR-5 element.

[0505] 361. The method of Paragraph 358, wherein said THAP responsive element is an ER-11 element.

[0506] 362. The method of Paragraph 358, wherein said THAP responsive element is THRE.

[0507] 363. A method of modulating the interaction between a nucleic acid and a THAP/chemokine complex, said method comprising providing a transcription factor decoy which comprises a THAP responsive element, thereby modulating the interaction between said nucleic acid and said THAP/chemokine complex.

[0508] 364. The method of Paragraph 363, wherein said THAP-family polypeptide is THAP1.

[0509] 365. The method of Paragraph 363, wherein said chemokine is selected from the group consisting of SLC, CCL19, CCL5, CXCL11, CXCL10 and CXCL9.

[0510] 366. The method of Paragraph 363, wherein said chemokine is SLC.

[0511] 367. The method of Paragraph 363, wherein said chemokine is CXCL9.

[0512] 368. The method of Paragraph 363, wherein said THAP responsive element is a DR-5 element.

[0513] 369. The method of Paragraph 363, wherein said THAP responsive element is an ER-11 element.

[0514] 370. The method of Paragraph 363, wherein said THAP responsive element is THRE.

[0515] 371. A vector packaging cell line comprising a cell comprising a viral vector which comprises a promoter operably linked to a nucleic acid encoding a THAP-family polypeptide or a biologically active fragment thereof.

[0516] 372. The cell line of Paragraph 371, wherein said cell further comprises an introduced nucleic acid construct comprising a nucleic acid encoding a chemokine operably linked to a promoter.

[0517] 373. The cell line of Paragraph 372, wherein said chemokine-encoding construct is included on the same vector as said nucleic acid encoding said THAP-family polypeptide or biologically active fragment thereof.

[0518] 374. The cell line of Paragraph 372, wherein said nucleic acid encoding said chemokine encodes a chemokine selected from the group consisting of SLC, CCL19, CCL5, CXCL11, CXCL10 and CXCL9.

[0519] 375. The cell line of Paragraph 372, wherein said nucleic acid encoding said chemokine encodes SLC.

[0520] 376. The cell line of Paragraph 372, wherein said nucleic acid encoding said chemokine encodes CXCL9.

[0521] 377. The cell line of Paragraph 371, wherein said THAP-family polypeptide is THAP1.

[0522] 378. The cell line of Paragraph 371, wherein said cell is a mammalian cell.

[0523] 379. The cell line of Paragraph 378, wherein said cell is a human cell.

[0524] 380. The cell line of Paragraph 371, wherein said viral vector is an adenoviral vector.

[0525] 381. The cell line of Paragraph 371, wherein said viral vector is a retroviral vector.

[0526] 382. A cell which is genetically engineered to express a THAP-family polypeptide or a biologically active fragment thereof.

[0527] 383. The cell line of Paragraph 382, wherein said THAP-family polypeptide is THAP1.

[0528] 384. The cell line of Paragraph 382, wherein said cell is a mammalian cell.

[0529] 385. The cell line of Paragraph 382, wherein said cell is a human cell.

[0530] 386. The cell line of Paragraph 382, wherein said THAP family polypeptide is encoded by a gene that is introduced into the cell on an adenoviral vector.

[0531] 387. The cell line of Paragraph 382, wherein said THAP family polypeptide is encoded by a gene that is introduced into the cell on a retroviral vector.

[0532] 388. A method of constructing a cell which expresses a recombinant THAP-family polypeptide, said method comprising introducing into a cell a vector comprising a nucleic acid encoding a THAP-family polypeptide or a biologically active fragment thereof operably linked to a promoter.

[0533] 389. The method of Paragraph 388, further comprising introducing into a cell a nucleic acid construct comprising a nucleic acid encoding a chemokine operably linked to a promoter.

[0534] 390. The method of Paragraph 389, wherein said chemokine-encoding construct is included on the same vector as said nucleic acid encoding said THAP-family polypeptide or biologically active fragment thereof.

[0535] 391. The method of Paragraph 389, wherein said nucleic acid encoding said chemokine encodes a chemokine selected from the group consisting of SLC, CCL19, CCL5, CXCL11, CXCL10 and CXCL9.

[0536] 392. The method of Paragraph 389, wherein said nucleic acid encoding said chemokine encodes SLC.

[0537] 393. The method of Paragraph 389, wherein said nucleic acid encoding said chemokine encodes CXCL9.

[0538] 394. The method of Paragraph 388, wherein said THAP-family polypeptide is THAP1.

[0539] 395. The method of Paragraph 388, wherein said cell is a mammalian cell.

[0540] 396. The method of Paragraph 395, wherein said cell is a human cell.

[0541] 397. The method of Paragraph 388, wherein said vector is a viral vector.

[0542] 398. The method of Paragraph 397, wherein said vector is an adenoviral vector.

[0543] 399. The method of Paragraph 397, wherein said vector is a retroviral vector.

[0544] 400. The method of Paragraph 388, wherein said vector is introduced into said cell by transfection.

[0545] 401. A method of ameliorating symptoms associated with a condition mediated by a THAP/chemokine complex, said method comprising:

[0546] introducing into a cell a nucleic acid construct comprising a nucleic acid encoding a chemokine operably linked to a promoter and a nucleic acid construct comprising a nucleic acid encoding a THAP-family polypeptide or a biologically active fragment thereof operably linked to a promoter; and

[0547] expressing said nucleic acid encoding said chemokine and said nucleic acid encoding said THAP-family polypeptide or biologically active fragment thereof.

[0548] 402. The method of Paragraph 401, wherein said nucleic acid constructs are present on a single vector.

[0549] 403. The method of Paragraph 401, wherein said nucleic acid constructs are present on different vectors.

[0550] 404. The method of Paragraph 401, wherein said cell is a mammalian cell.

[0551] 405. The method of Paragraph 404, wherein said cell is a human cell.

[0552] 406. The method of Paragraph 401, wherein said nucleic acid encoding said chemokine encodes a chemokine selected from the group consisting of SLC, CCL19, CCL5, CXCL11, CXCL10 and CXCL9.

[0553] 407. The method of Paragraph 401, wherein said nucleic acid encoding said chemokine encodes SLC.

[0554] 408. The method of Paragraph 401, wherein said nucleic acid encoding said chemokine encodes CXCL9.

[0555] 409. The method of Paragraph 401, wherein said THAP-family polypeptide is THAP1.

[0556] 410. A method of identifying a test compound that modulates transcription at a THAP responsive element, said method comprising:

[0557] comparing the level of transcription from a THAP responsive promoter in the presence and absence of a test compound wherein a determination that the level of transcription is increased or decreased in the presence of said test compound relative to the level of transcription in the absence of said test compound indicates that said test compound is a candidate modulator of transcription.

[0558] 411. The method of Paragraph 410, wherein the level of transcription from said THAP responsive promoter in the presence and absence of the test compound is determined by performing an in vitro transcription reaction using a construct comprising said THAP responsive promoter and a THAP-family polypeptide or a biologically active fragment thereof, wherein said THAP-family polypeptide comprises an amino acid sequence having at least 30% amino acid identity to an amino acid sequence of SEQ ID NO: 1.

[0559] 412. The method of Paragraph 410, wherein the level of transcription from said THAP responsive promoter in the presence and the absence of the test compound is determined by measuring the level of transcription from a THAP responsive promoter in a cell expressing a THAP-family polypeptide or a biologically active fragment thereof, wherein said THAP-family polypeptide comprises an amino acid sequence having at least 30% amino acid identity to an amino acid sequence of SEQ ID NO: 1.

[0560] 413. The method of Paragraph 410, wherein said THAP-family polypeptide or biologically active fragment thereof is selected from the group consisting of SEQ ID NOs: 1-114 and biologically active fragments thereof.

[0561] 414. The method of Paragraph 410, wherein said THAP responsive promoter comprises a THAP responsive element having a nucleotide sequence selected from the. group consisting of SEQ ID NOs: 140-159, SEQ ID NO: 306, and homologs thereof having at least 60% nucleotide identity.

[0562] 415. The method of Paragraph 411 or Paragraph 122, wherein the level of transcription in the presence or absence of said test compound is measured in the presence of a chemokine.

[0563] 416. The method of Paragraph 415, wherein said chemokine is selected from the group consisting of CCL family chemokines and CXCL family chemokines.

[0564] 417. The method of Paragraph 416, wherein said CCL family chemokine is selected from the group consisting of SLC, CCL19 and CCL5.

[0565] 418. The method of Paragraph 416, wherein said CXCL family chemokine is selected from the group consisting of CXCL11, CXCL10 and CXCL9.

[0566] 419. The method of Paragraph 415, wherein the level of transcription in the presence or absence of said test compound is measured in a cell which expresses a receptor for said chemokine.

[0567] 420. The method of Paragraph 419, wherein said chemokine receptor is selected from the group consisting of CCR1, CCR3, CCR5, CCR7, CCR11 and CXCR3.

[0568] 421. The method of Paragraph 420, wherein said chemokine is selected from the group consisting of SLC, CCL19, CCL5, CXCL11, CXCL10 and CXCL9.

[0569] 422. The method of Paragraph 419, wherein said THAP-family polypeptide comprises THAP1 or a biologically active fragment thereof and said cell expresses the CCR7 receptor.

[0570] 423. The method of Paragraph 422, wherein said chemokine is SLC.

[0571] 424. The method of Paragraph 419, wherein said THAP-family polypeptide comprises THAP1 or a biologically active fragment thereof and said cell expresses the CXCR3 receptor.

[0572] 425. Them method of Paragraph 424, wherein said chemokine is CXCL9.

[0573] 426. The method of Paragraph 412, wherein said THAP responsive promoter is in a gene endogenous to said cell.

[0574] 427. The method of Paragraph 412, wherein said THAP responsive promoter has been introduced into said cell.

[0575] 428. The method of Paragraph 412, wherein said THAP responsive promoter does not comprise a THAP responsive element.

[0576] 429. The method of Paragraph 428, wherein said THAP responsive promoter is modulated by a product of a gene that is under the control of a promoter which comprises a THAP responsive element.

[0577] 430. A method for reducing the symptoms associated with a condition selected from the group consisting of excessive or insufficient angiogenesis, inflammation, metastasis of a cancerous tissue, excessive or insufficient apoptosis, cardiovascular disease and neurodegenerative diseases comprising modulating the interaction between a THAP-family polypeptide and a chemokine in an individual suffering from said condition.

[0578] 431. The method of Paragraph 430, wherein said THAP-family polypeptide is selected from a group consisting of polypeptides having an amino acid sequence of SEQ ID NOs: 1-114.

[0579] 432. The method of Paragraph 430, wherein said chemokine is selected from the group consisting of SLC, CCL19, CCL5, CXCL11, CXCL10 and CXCL9.

[0580] 433. The method of Paragraph 430; wherein said chemokine is SLC and the condition is inflammation.

[0581] 434. The method of Paragraph 430, wherein said chemokine is SLC and the condition is excessive or insufficient angiogenesis.

[0582] 435. The method of Paragraph 430, wherein said chemokine is CXCL9 and the condition is inflammation.

[0583] 436. The method of Paragraph 430, wherein said chemokine is CXCL9 and the condition is excessive or insufficient angiogenesis.

[0584] 437. A method for reducing the symptoms associated with a condition resulting from the activity of a chemokine in an individual comprising modulating the interaction between said chemokine and a THAP-family polypeptide in said individual.

[0585] 438. The method of Paragraph 437, wherein said chemokine is selected from the group consisting of SLC, CCL19, CCL5, CXCL11, CXCL10 and CXCL9.

[0586] 439. The method of Paragraph 437, wherein said chemokine is SLC.

[0587] 440. The method of Paragraph 437, wherein said chemokine is CXCL9.

[0588] 441. The method of Paragraph 437, wherein said THAP-family polypeptide is THAP-1.

[0589] 442. The method of Paragraph 437, wherein the condition is inflammation.

[0590] 443. The method of Paragraph 437, wherein the condition is excessive or insufficient angiogenesis.

[0591] 444. The method of Paragraph 437, wherein the interaction between said chemokine and said THAP-family polypeptide is modulated by administering to an individual, a therapeutically effective amount of a THAP-type chemokine-binding agent.

[0592] 445. The method of Paragraph 444, wherein said THAP-type chemokine-binding agent comprises a therapeutically effective amount of a polypeptide selected from the group consisting of a THAP1 polypeptide, an chemokine-binding domain of a THAP1 polypeptide, a THAP1 polypeptide oligomer, an oligomer comprising a THAP1 chemokine-binding domain, a THAP1 polypeptide-immunoglobulin fusion, a THAP1 chemokine-binding domain-immunoglobulin fusion and polypeptide homologs having at least 30% amino acid identity to any one of the aforementioned polypeptides.

[0593] 446. The method of Paragraph 445, wherein said chemokine-binding domain is an SLC-binding domain.

[0594] 447. The method of Paragraph 445, wherein said chemokine-binding domain is a CXCL9-binding domain.

[0595] 448. A method of reducing the symptoms associated with a condition resulting from the activity of a THAP-family polypeptide in an individual comprising modulating the extent of transcriptional repression or activation of at least one THAP-family responsive promoter in said individual.

[0596] 449. The method of Paragraph 448, wherein said THAP-family polypeptide comprises an amino acid sequence selected from the group consisting of SEQ ID NOs: 1-114.

[0597] 450. The method of Paragraph 448, wherein said THAP-family polypeptide comprises an amino acid sequence of SEQ ID NO: 3.

[0598] 451. The method of Paragraph 448, wherein said THAP responsive promoter comprises a THAP responsive element.

[0599] 452. The method of Paragraph 448, wherein said THAP responsive promoter does not comprise a THAP responsive element.

[0600] 453. A method of reducing the symptoms associated with a condition resulting from the activity of a THAP-family polypeptide in an individual, said method comprising:

[0601] diagnosing said individual with a condition resulting from the activity of a THAP-family polypeptide; and

[0602] administering a compound which modulates the interaction between said THAP-family polypeptide and a chemokine to said individual.

[0603] 454. The method of Paragraph 453, wherein said THAP-family polypeptide is selected from a group consisting of polypeptides having an amino acid sequence of SEQ ID NOs: 1-114.

[0604] 455. The method of Paragraph 453, wherein said THAP-family polypeptide is THAP1.

[0605] 456. The method of Paragraph 453, wherein said chemokine is selected from the group consisting of SLC, CCL19, CCL5, CXCL11, CXCL10 and CXCL9.

[0606] 457. The method of Paragraph 453, wherein said chemokine is SLC.

[0607] 458. The method of Paragraph 453, wherein said chemokine is CXCL9.

[0608] 459. A method of reducing the symptoms associated with a condition resulting from the activity of a THAP-family polypeptide in an individual comprising:

[0609] diagnosing said individual with a condition resulting from the activity of THAP-family polypeptide; and

[0610] administering a chemokine or an analog thereof to said individual.

[0611] 460. The method of Paragraph 459, wherein said THAP-family polypeptide is selected from a group consisting of polypeptides having an amino acid sequence of SEQ ID NOs: 1-114.

[0612] 461. The method of Paragraph 459, wherein said THAP-family polypeptide is THAP1.

[0613] 462. The method of Paragraph 459, wherein said chemokine is selected from the group consisting of SLC, CCL19, CCL5, CXCL11, CXCL10 and CXCL9.

[0614] 463. The method of Paragraph 459, wherein said chemokine is SLC.

[0615] 464. The method of Paragraph 459, wherein said chemokine is CXCL9.

[0616] 465. A method of reducing the symptoms associated with transcriptional repression or activation mediated by a THAP-family polypeptide in an individual comprising administering a chemokine or an analog thereof to said individual.

[0617] 466. The method of Paragraph 465, wherein said THAP-family polypeptide is selected from a group consisting of polypeptides having an amino acid sequence of SEQ ID NOs: 1-114.

[0618] 467. The method of Paragraph 465, wherein said THAP-family polypeptide is THAP1.

[0619] 468. The method of Paragraph 465, wherein said chemokine is selected from the group consisting of SLC, CCL19, CCL5, CXCL11, CXCL10 and CXCL9.

[0620] 469. The method of Paragraph 465, wherein said chemokine is SLC.

[0621] 470. The method of Paragraph 465, wherein said chemokine is CXCL9.

[0622] 471. A method of reducing the symptoms associated with the activity of a chemokine in an individual comprising modulating the extent to which said chemokine is transported to the nucleus of a cell in said individual.

[0623] 472. The method of Paragraph 471, wherein said chemokine is selected from the group consisting of SLC, CCL19, CCL5, CXCL11, CXCL10 and CXCL9.

[0624] 473. The method of Paragraph 471, wherein said cell expresses a chemokine receptor selected from the group consisting of CCR1, CCR3, CCR5, CCR7, CCR11 and CXCR3.

[0625] 474. The method of Paragraph 473, wherein said chemokine is SLC and said chemokine receptor is CCR7.

[0626] 475. The method of Paragraph 473, wherein said chemokine is CXCL9 and said chemokine receptor is CXCR3.

[0627] 476. The method of Paragraph 471, wherein the extent of transport of said chemokine into a nucleus of a cell is modulated by contacting said chemokine with a THAP-type chemokine-binding agent.

[0628] 477. The method of Paragraph 476, wherein said THAP-type chemokine-binding agent selected from the group consisting of a THAP1 polypeptide, a chemokine-binding domain of a THAP1 polypeptide, a THAP1 polypeptide oligomer, an oligomer comprising a THAP1 chemokine-binding domain, a THAP1 polypeptide-immunoglobulin fusion, a THAP1 chemokine-binding domain-immunoglobulin fusion and polypeptide homologs having at least 30% amino acid identity to any one of the aforementioned polypeptides.

[0629] 478. The method of Paragraph 477, wherein said chemokine-binding domain is an SLC-binding domain.

[0630] 479. The method of Paragraph 477, wherein said chemokine-binding domain is a CXCL9-binding domain.

[0631] 480. A method for identifying a compound which modulates the transport of a chemokine into the nucleus comprising comparing the extent of said chemokine transport into the nucleus of cells in the presence and absence of a test compound.

[0632] 481. The method of Paragraph 480, wherein said chemokine is selected from the group consisting of SLC, CCL19, CCL5, CXCL11, CXCL10 and CXCL9.

[0633] 482. The method of Paragraph 480, wherein said cell expresses a chemokine receptor selected from the group consisting of CCR1, CCR3, CCR5, CCR7, CCR11 and CXCR3.

[0634] 483. The method of Paragraph 482, wherein said chemokine is SLC and said chemokine receptor is CCR7.

[0635] 484. The method of Paragraph 482, wherein said chemokine is CXCL9 and said chemokine receptor is CXCR3.

[0636] 485. The method of Paragraph 480, wherein the extent of transport of said chemokine into a nucleus of a cell is modulated by contacting said chemokine with a THAP-type chemokine-binding agent.

[0637] 486. The method of Paragraph 485, wherein said THAP-type chemokine-binding agent is selected from the group consisting of a THAP1 polypeptide, a chemokine-binding domain of a THAP1 polypeptide, a THAP1 polypeptide oligomer, an oligomer comprising a THAP1 chemokine-binding domain, a THAP1 polypeptide-immunoglobulin fusion, a THAP1 chemokine-binding domain-immunoglobulin fusion and polypeptide homologs having at least 30% amino acid identity to any one of the aforementioned polypeptides.

[0638] 487. The method of Paragraph 486, wherein said chemokine-binding domain is an SLC-binding domain.

[0639] 488. The method of Paragraph 486, wherein said chemokine-binding domain is a CXCL9-binding domain.

[0640] 489. The method of Paragraph 480, wherein transport of SLC into the nucleus is measured by immunostaining.

[0641] 490. A vector comprising a THAP responsive promoter operably linked to a nucleic acid encoding a detectable product.

[0642] 491. The vector of Paragraph 490, wherein said THAP responsive promoter comprises a THAP responsive element.

[0643] 492. The vector of Paragraph 490, wherein said THAP responsive promoter does not comprise a THAP responsive element.

[0644] 493. A genetically engineered cell comprising the vector of any one of Paragraphs 490-492.

[0645] 494. An in vitro transcription reaction comprising a nucleic acid comprising a THAP responsive promoter, ribonucleotides and an RNA polymerase.

[0646] 495. The in vitro transcription reaction of Paragraph 494, wherein said THAP responsive promoter comprises a THAP responsive element.

[0647] 496. An isolated mutant THAP-family polypeptide that does not bind to a chemokine.

[0648] 497. The isolated mutant THAP-family polpeptide of Paragraph 496, wherein said chemokine is selected from the group consisting of SLC, CCL19, CCL5, CXCL11, CXCL10 and CXCL9.

[0649] 498. The isolated mutant THAP-family polypeptide of Paragraph 496, wherein said chemokine is SLC.

[0650] 499. The isolated mutant THAP-family polypeptide of Paragraph 496, wherein said chemokine is CXCL9.

[0651] 500. The isolated mutant THAP-family polypeptide of Paragraph 496, wherein said THAP-family polypeptide is THAP1.

[0652] 501. The isolated mutant THAP-family polypeptide of Paragraph 500, wherein said polypeptide comprises an amino acid sequence of SEQ ID NO: 3.

[0653] 502. The isolated mutant THAP-family polypeptide of Paragraph 501, wherein said amino acid sequence comprises at least one point mutation. 503. The methods of Paragraphs 291, 310, 328, 358, 363, 388, or 401 or the compositions of Paragraphs 371 or 382, wherein said THAP-family polypeptide comprises an amino acid sequence selected from the group consisting of of SEQ ID NOs: 1-114.

[0654] 504. The methods of Paragraphs 294, 342, 358 or 363 or the compositions of Paragraphs 349 or 353, wherein said THAP responsive element comprises a nucleic acid having a nucleotide sequence selected from the group consisting of SEQ ID NOs: 140-159 and 306.

[0655] 505. The methods of Paragraphs 291, 310, or 328, wherein said gene comprises a nucleic acid having a nucleotide sequence selected from the group consisting of SEQ ID NOs: 344, 346, 348, 350, 352, 354, 356, 358, 360, 362, 364, 366, 368, 370, 372, 374, 376, 378, 380, 382, 384, 386, 388, 390, 392, 394, 396, 398, 400, 402, 404, 406, 408, 410, 412, 414, 416, 418, 420, 422, 424, 426, 428, 430, 432, 434, 436, 438, 440, 442, 444, 446, 448, 450, 452, 454, 456, 458, 460, 462, 464, 466, 468, 470, 472, 474, 476, 478, 480, 482, 484, 486, 488, 490, 492, 494, 496, 498, 500, 502, 504, 506, 508, 510, 512, 514, 516, 530, 532, 534 and portions thereof

[0656] 506. The methods of Paragraphs 291, 310 or 328, wherein said gene encodes a polypeptide having an amino acid sequence selected from the group consisting of SEQ ID NOs: 343, 345, 347, 349, 351, 353, 355, 357, 359, 361, 363, 365, 367, 369, 371, 373, 375, 377, 379, 381, 383, 385, 387, 389, 391, 393, 395, 397, 399, 401, 403, 405, 407, 409, 411, 413, 415, 417, 419, 421, 423, 425, 427, 429, 431, 433, 435, 437, 439, 441, 443, 445, 447, 449, 451, 453, 455, 457, 459, 461, 463, 465, 467, 469, 471, 473, 475, 477, 479, 481, 483, 485, 487, 489, 491, 493, 495, 497, 499, 501, 503, 505, 507, 509, 511, 513, 515, 531, 533, 535 and portions thereof.

[0657] 507. The methods of Paragraphs 310, 328, 363, 388 or 401 or the composition of Paragraph 371, wherein said chemokine has an amino acid sequence selected from the group consisting of SEQ ID NOs: 119, 271, 273, 275, 277, 289 and 323.

[0658] 508. A method of ameliorating symptoms associated with inflammation, said method comprising modulating the expression of a THAP responsive gene or a gene responsive to a THAP/chemokine complex.

[0659] 509. The method of Paragraph 508, wherein said gene expression is modulated by modulating the interaction between a nucleic acid and a THAP-family polypeptide or a biologically active fragment thereof, modulating the interaction between a nucleic acid and a THAP/chemokine complex or modulating the interaction between a chemokine and THAP-family polypeptide or a biologically active fragment thereof.

[0660] 510. A method of ameliorating symptoms associated with a condition resulting from excessive or insufficient angiogenesis, said method comprising modulating the expression of a THAP responsive gene or a gene responsive to a THAP/chemokine complex.

[0661] 511. The method of Paragraph 510, wherein said gene expression is modulated by modulating the interaction between a nucleic acid and a THAP-family polypeptide or a biologically active fragment thereof, modulating the interaction between a nucleic acid and a THAP/chemokine complex or modulating the interaction between a chemokine and THAP-family polypeptide or a biologically active fragment thereof.

[0662] 512. A method of ameliorating the symptoms associated with a condition resulting from the proliferation of a cancer cell, said method comprising modulating the expression of a THAP responsive gene or a gene responsive to a THAP/chemokine complex.

[0663] 513. The method of Paragraph 512, wherein said gene expression is modulated by modulating the interaction between a nucleic acid and a THAP-family polypeptide or a biologically active fragment thereof, modulating the interaction between a nucleic acid and a THAP/chemokine complex or modulating the interaction between a chemokine and THAP-family polypeptide or a biologically active fragment thereof.

[0664] It will be appreciated that THAP compositions and methods of making and using have been described in other copending patent applications. These patent applications include, U.S. patent application Ser. No. 10/317,832, entitled NOVEL DEATH ASSOCIATED PROTEINS AND THAP1 AND PAR4 PATHWAYS IN APOPTOSIS CONTROL, filed Dec. 10, 2002 and U.S. patent application Ser. No. 10/601,072, entitled CHEMOKINE-BINDING PROTEIN AND METHODS OF USE, filed Jun. 19, 2003, the disclosures of which are incorporated herein by reference in their entireties.

### BRIEF DESCRIPTION OF THE DRAWINGS

[0665] FIG. 1A illustrates an amino acid sequence alignment of human THAP1 (hTHAP1) (SEQ ID NO: 3) and mouse THAP1 (mTHAP1) (SEQ ID NO: 99) orthologous polypeptides. Identical amino acid residues are indicated with an asterisk.

[0666] FIG. 1B depicts the primary structure of the human THAP1 polypeptide. Positions of the THAP domain, the proline-rich region (PRO) and the bipartite nuclear localization sequence (NLS) are indicated.

[0667] FIG. 2 depicts the results of a Northern Blot analysis of THAP1 mRNA expression in 12 human tissues. Each lane contains 2 μg of poly A⁺ RNA isolated from the indicated human tissues. The blot was hybridized, under high-stringency conditions, with a ³²P-labeled THAP1 cDNA probe, and exposed at −70° C. for 72 hours.

[0668] FIG. 3A illustrates the interaction between THAP I and PAR4 in a yeast two-hybrid system. In particular, THAP1 binds to wild-type Par4 (Par4) and the leucine zipper-containing Par4 death domain (Par4DD) (amino acids 250-342 of PAR4) but not a Par4 deletion mutant lacking the death domain (PAR4Δ) (amino acids 1-276 of PAR4). A (+) indicates binding whereas a (−) indicated lack of binding.

[0669] FIG. 3B shows the binding of in vitro translated, ³⁵S-methionine-labeled THAP1 to a GST-Par4DD polypeptide fusion. Par4DD was expressed as a GST fusion protein then purified on an affinity matrix of glutathione sepharose. GST served as negative control. The input represents 1/10 of the material used in the binding assay.

[0670] FIG. 4A illustrates the interaction between PAR4 and several THAP1 deletion mutants both in vitro and in vivo. Each THAP1 deletion mutant was tested for binding to either PAR or PAR4DD in a yeast two hybrid system (two hybrid bait), to PAR4DD in GST pull down assays (in vitro) and to myc-Par4DD in primary human endothelial cells (in vivo). A (+) indicates binding whereas a (−) indicated lack of binding.

[0671] FIG. 4B shows the binding of several in vitro translated, ³⁵S-methionine-labeled THAP1 deletion mutants to a GST-Par4DD polypeptide fusion. Par4DD was expressed as a GST fusion protein then purified on an affinity matrix of glutathione sepharose. GST served as negative control. The input represents 1/10 of the material used in the binding assay.

[0672] FIG. 5A depicts an amino acid sequence alignment of the Par4 binding domain of human THAP1 (SEQ ID NO: 117) and mouse THAP1 (SEQ ID NO: 116) orthologues with that of mouse ZIP kinase (SEQ ID NO: 115), another Par4 binding partner. An arginine-rich consensus Par4 binding site (SEQ ID NO: 15), derived from this alignment, is also indicated.

[0673] FIG. 5B shows the primary structure of the THAP1 wild-type polypeptide and two THAP1 mutants (THAP1Δ(QRCRR) and THAP1 RR/AA). THAP1Δ(QRCRR) is a deletion mutant having a deletion of amino acids at positions 168-172 of THAP1 (SEQ ID NO: 3) whereas THAP RR/AA is a mutant having the two arginines located at amino acid positions 171 and 172 to THAP1 (SEQ ID NO: 3) replaced with alanines. Results obtained, in yeast two-hybrid system with Par4 and Par4DD baits (two hybrid bait), in GST pull down assays with GST-Par4DD (in vitro) and in the in vivo interaction test with myc-Par4DD in primary human endothelial cells (in vivo) are summarized.

[0674] FIG. 6A is a graph which compares apoptosis levels in cells transfected with GFP-APSK1, GFP-Par4 or GFP-THAP1 expression vectors. Apoptosis was quantified by DAPI staining of apoptotic nuclei, 24 h after serum-withdrawal. Values are the means of three independent experiments.

[0675] FIG. 6B is a graph which compares apoptosis levels in cells transfected with GFP-APSK1 or GFP-THAP1 expression vectors. Apoptosis was quantified by DAPI staining of apoptotic nuclei, 24 h after addition of TNFα. Values are the means of three independent experiments.

[0676] FIG. 7A shows the binding of in vitro translated ³⁵S-methionine labeled THAP1 (wt) or THAP1ΔTHAP (Δ) to a GST-Par4DD polypeptide fusion. Par4DD was expressed as a GST fusion protein then purified on an affinity matrix of glutathione sepharose. GST served as negative control. The input represents 1/10 of the material used in the binding assay.

[0677] FIG. 7B is a graph which compares the proapoptotic activity of THAP1 with a THAP1 mutant having its THAP domain (amino acids 1-90 of SEQ ID NO: 3) deleted. The percentage of apoptotic cells in mouse 3T3 fibroblasts overexpressing GFP-APSK1 (control), GFP-THAP1 (THAP1) or GFP-THAP1ΔTHAP (THAP1ΔTHAP) was determined by counting apoptotic nuclei after DAPI staining. Values are the means of three independent experiments.

[0678] FIG. 8 depicts the primary structure of twelve human THAP proteins. The THAP domain (colored grey) is located at the amino-terminus of each of the twelve human THAP proteins. The black box in THAP1, THAP2 and THAP3 indicates a nuclear localization sequence, rich in basic residues, that is conserved in the three proteins. The number of amino-acids in each THAP protein is indicated; (*) indicates the protein is not full length.

[0679] FIG. 9A depicts an amino acid sequence alignment of the THAP domain of human THAP1 (hTHAP1, SEQ ID NO: 123) with the DNA binding domain of drosophila melanogaster P-element transposase (dmTransposase, SEQ ID NO: 124). Identical residues are boxed in black and conserved residues in grey. A THAP domain consensus sequence (SEQ ID NO: 125) is also shown.

[0680] FIG. 9B depicts an amino acid sequence alignment of the THAP domains of twelve members of the human THAP family (hTHAP1, SEQ ID NO: 126; hTHAP2, SEQ ID NO: 131; hTHAP3, SEQ ID NO: 127; hTHAP4, SEQ ID NO: 130; hTHAP5, SEQ ID NO: 128; hTHAP6, SEQ ID NO: 135; hTHAP7, SEQ ID NO: 133; hTHAP8, SEQ ID NO: 129; hTHAP9, SEQ ID NO: 134; hTHAP10, SEQ ID NO: 137; hTHAP11, SEQ ID NO: 136; hTHAP0, SEQ ID NO: 132) with the DNA binding domain of Drosophila melanogaster P-element transposase (dmTransposae, SEQ ID NO: 138). Residues conserved among at least seven of the thirteen sequences are boxed. Black boxes indicate identical residues whereas boxes shaded in grey show similar amino acids. Dashed lines represent gaps introduced to align sequences. A THAP domain consensus sequence (SEQ ID NO: 139) is also shown.

[0681] FIG. 9C depicts an amino acid sequence alignment of 95 distinct THAP domain sequences, including hTHAP1 through hTHAP11 and hTHAP0 (SEQ ID NOs: 3-14, listed sequentially beginning from the top), with 83 THAP domains from other species (SEQ ID NOs: 16-98, listed sequentially beginning at the sequence denoted sTHAP1 and ending at the sequence denoted ceNP_{—}498747.1), which were identified by searching GenBank genomic and EST databases with the human THAP sequences. Residues conserved among at least 50% of the sequences are boxed. Black boxes indicate identical residues whereas boxes shaded in grey show similar amino acids. Dashed lines represent gaps introduced to align sequences. The species are indicated: Homo sapiens (h); Sus scrofa (s); Bos taurus (b); Mus musculus (m); Rattus norvegicus (r); Gallus gallus (g); Xenopus laevi (x); Danio rerio (z); Oryzias latipes (o); Drosophila melanogaster (dm); Anopheles gambiae (a); Bombyx mori (bm); Caenorhabditis elegans (ce). A consensus sequence (SEQ ID NO: 2) is also shown. Amino acids underlined in the consensus sequence are residues which are conserved in all 95 THAP sequences.

[0682] FIG. 10A shows an amino acid sequence alignment of the human THAP1 (SEQ ID NO: 3), THAP2 (SEQ ID NO: 4) and THAP3 (SEQ ID NO: 5) protein sequences. Residues conserved among at least two of the three sequences are boxed. Black boxes indicate identical residues whereas boxes shaded in grey show similar amino acids. Dashed lines represent gaps introduced to align sequences. Regions corresponding to the THAP domain, the PAR4-binding domain, and the nuclear localization signal (NLS) are also indicated.

[0683] FIG. 10B shows the primary structure of human. THAP1, THAP2 and THAP3 and results of two-hybrid interactions between each THAP protein and Par4 or Par4 death domain (Par4DD) in the yeast two hybrid system.

[0684] FIG. 10C shows the binding of in vitro translated, ³⁵S-methionine-labeled THAP2 and THAP3 to a GST-Par4DD polypeptide fusion. Par4DD was expressed as a GST fusion protein then purified on an affinity matrix of glutathione sepharose. GST served as negative control. The input represents 1/10 of the material used in the binding assay.

[0685] FIG. 11A is a graph which compares apoptosis levels in cells transfected with GFP-APSK1, GFP-THAP2 or GFP-THAP3 expression vectors. Apoptosis was quantified by DAPI staining of apoptotic nuclei, 24 h after serum-withdrawal. Values are the means of two independent representative experiments.

[0686] FIG. 11B is a graph which compares apoptosis levels in cells transfected with GFP-APSK1, GFP-THAP2 or GFP-THAP3 expression vectors. Apoptosis was quantified by DAPI staining of apoptotic nuclei, 24 h after additional of TNFα. Values are the means of two independent representative experiments.

[0687] FIG. 12 illustrates the results obtained by screening several different THAP1 mutants in a yeast two-hybrid system with SLC/CCL21 bait. The primary structure of each THAP1 deletion mutant that was tested is shown. The 70 carboxy-terminal residues of THAP1 (amino acids 143-213) are sufficient for binding to chemokine SLC/CCL21.

[0688] FIG. 13 illustrates the interaction of THAP1 with wild type SLC/CCL21 and a SLC/CCL21 mutant deleted of the basic carboxy-terminal extension (SLC/CCL21ΔCOOH). The interaction was analyzed both in yeast two-hybrid system with THAP1 bait and in vitro using GST-pull down assays with GST-THAP1.

[0689] FIG. 14 depicts micrographs of the primary human endothelial cells were transfected with the GFP-THAP0, 1, 2, 3, 6, 7, 8, 10, 11 (green fluorescence) expression constructs. To reveal the nuclear localization of the human THAP proteins, nuclei were counterstained with DAPI (blue). The bar equals 5 μm.

[0690] FIG. 15A is a threading-derived structural alignment between the THAP domain of human THAP1 (THAP1) (amino acids 1-81 of SEQ ID NO: 3) and the thyroid receptor β DNA binding domain (NLLB) (SEQ ID NO: 121). The color coding is identical to that described in FIG. 15D.

[0691] FIG. 15B shows a model of the three-dimensional structure of the THAP domain of human THAP1 based on its homology with the crystallographic structure of thyroid receptor β. The color coding is identical to that described in FIG. 15D.

[0692] FIG. 15C shows a model of the three-dimensional structure of the DNA-binding domain of Drosophila transposase (DmTRP) based on its homology with the crystallographic structure of the DNA-binding domain of the glucocorticoid receptor. The color coding is identical to that described in FIG. 15D.

[0693] FIG. 15D is a threading-derived structural alignment between the Drosophila melanogaster transposase DNA binding domain (DmTRP) (SEQ ID NO: 120) and the glucocorticoid receptor DNA binding domain (GLUA) (SEQ ID NO: 122). In accordance with the sequences and structures in FIGS. 15A-15C, the color-coding is the following: brown indicates residues in α-helices; indigo indicates residues in β-strands; red denotes the eight conserved Cys residues in NLLB and GLUA or for the three Cys residues common to THAP1 and DmTRP; magenta indicates other Cys residues in THAP1 or DmTRP; cyan denotes the residues involved in the hydrophobic interactions networks colored in THAP1 or DmTRP.

[0694] FIG. 16A illustrates the results obtained by screening several different THAP1 mutants in a yeast two-hybrid system with THAP1 bait. The primary structure of each THAP1 deletion mutant that was tested is shown. A (+) indicates binding whereas a (−) indicates no binding.

[0695] FIG. 16B shows the binding of several in vitro translated, ³⁵S-methionine-labeled THAP1 deletion mutants to a GST-THAP1 polypeptide fusion. Wild-type THAP1 was expressed as a GST fusion protein then purified on an affinity matrix of glutathione sepharose. GST served as negative control. The input represents 1/10 of the material used in the binding assay.

[0696] FIG. 17A is an agarose gel showing two distinct THAP1 cDNA fragments were obtained by RT-PCR. Two distinct THAP1 cDNAs were ˜400 and 600 nucleotides in length.

[0697] FIG. 17B shows that the 400 nucleotide fragment corresponds to an alternatively spliced isoform of human THAP1 cDNA, lacking exon 2 (nucleotides 273-468 of SEQ ID 160).

[0698] FIG. 17C is a Western blot which shows that the second isoform of human THAP1 (THAP1b) encodes a truncated THAP1 protein (THAP1 C3) lacking the amino-terminal THAP domain.

[0699] FIG. 18A shows a specific DNA binding site recognized by the THAP domain of human THAP1. The THAP domain recognizes GGGCAA or TGGCAA DNA target sequences preferentially organized as direct repeats with 5 nucleotide spacing (DR-5). The consensus sequence 5′-GGGCAAnnnnnTGGCAA-3′ (SEQ ID NO: 149). The DR-5 consensus was generated by examination of 9 nucleic acids bound by THAP1 (SEQ ID NO: 140-148, beginning sequentially from the top).

[0700] FIG. 18B shows a second specific DNA binding site recognized by the THAP domain of human THAP1. The THAP domain recognizes everted repeats with 11 nucleotide spacing (ER-11) having a consensus sequence 5′-TTGCCAnnnnnnnnnnnGGGCAA -3′ (SEQ ID NO: 159). The ER-11 consensus was generated by examination of 9 nucleic acids bound by THAP1 (SEQ ID NO: 150-158, beginning sequentially from the top).

[0701] FIG. 19 shows that THAP1 interacts with both CC and CXC chemokines both in vivo in a yeast two-hybrid system with THAP1 prey and in vitro using GST-pull down assays with immobilized GST-THAP1. The cytokine IFNγ was used as a negative control. Results are summarized as follows: +++ indicates strong binding; ++ indicates intermediate binding; +/− indicates some binding; − indicates no binding; and ND indicates not determined.

[0702] FIG. 20A is an SDS-polyacrylamide gel showing the relative amounts of chemokine and cytokine used in immobilized GST-THAP1 binding assays.

[0703] FIG. 20B is an SDS-polyacrylamide gel showing that neither the cytokine, IFNγ, nor any of the chemokines bound to immobilized GST alone.

[0704] FIG. 20C is an SDS-polyacrylamide gel showing that chemokines, CXCL10, CXCL9 and CCL19, but not the cytokine IFNγ, bound to immobilized GST-THAP1 fusions.

[0705] FIG. 21A shows the THAP1 protein fused to the Gal4 DNA-binding domain. This fusion was used in transcriptionnal assays with a Gal-UAS-luciferase reporter plasmid.

[0706] FIG. 21B shows results of assays wherein the Gal-UAS-luciferase reporter plasmid was co-transfected into COS7 cells with increasing amounts of the Gal4 DNA-binding domain-THAP1 fusion expression vector. This analysis revealed that, compared to the Gal4 DNA-binding domain alone, the Gal4 DNA-binding domain-THAP1 fusion represses transcriptional activity of the luciferase reporter. The repression effect of THAP1 was similar to that observed with the well characterized transcriptional repressor Suv39H1.

[0707] FIG. 22A shows that THAP1 as a nuclear receptor for chemokine SLC/CCL21. SLC binds to a cytoplasmic receptor such as CR7. Once internalized SCL/CCL21 is transported to the nucleus wherein it interacts with a THAP-family protein, such as THAP1. The bound SLC complex can bind DNA at certain recognition sequences so as to modulate transcription.

[0708] FIG. 22B shows the role of THAP1 as a nuclear receptor for chemokines SLC/CCL21 and MIG/CXCL9. SLC and MIG bind to cell surface receptors such as CCR7 (polypeptide sequence SEQ ID NO: 302, nucleotide sequence SEQ ID NO: 303) and CXCR3 (polypeptide sequence SEQ ID NO: 304, nucleotide sequence SEQ ID NO: 305). Once internalized SLC and MIG are transported into the nucleus wherein they interact with a THAP-family protein, such as THAP1. The bound SLC/THAP1 and MIG/THAP1 complexes can bind DNA at certain recognition sequences so as to modulate transcription.

[0709] FIG. 23 shows the nucleotide sequence of the human Fucosyltransferase TVII promoter (GenBank Accession Number AB012668, nucleotides 661-1080) (SEQ ID NO: 301). The sequence corresponding to the mRNA is underlined and the initiation codon (ATG) is indicated in bold. The promoter contains one GGGCAA (antisense orientation) and six GGGCAG (3 sense and 3 antisense orientations) THAP domain recognition elements, that are indicated in bold and underlined.

[0710] FIG. 24 shows a consensus sequence (THAP-responsive element, THRE) (SEQ ID NO: 306) recognized by the THAP domain of human THAP1. The THRE consensus was generated by examination of 18 nucleic acids bound by THAP1 (SEQ ID NO: 140-148 and 150-158). The THRE was validated experimentally by using oligonuceotides mutated at each position.

[0711] FIG. 25A shows the results of an EMSA assay carried out with the purified THAP domain from human THAP1 and oligonucleotides bearing wild type or mutant THRE sequences (wt, AGTAAGGGCAA (SEQ ID NO: 307); 3mut1, AGTAATTTCAA (SEQ ID NO: 308); 3mut3, AGTAAGGTCAA (SEQ ID NO: 309); 3mut4, AGTAAGTGCAA (SEQ ID NO: 310); 3mut14, AGTAAGGGCCA (SEQ ID NO: 311); and 3mut5, AGTAAGGGAAA (SEQ ID NO: 312)).

[0712] FIG. 25B shows the results of an EMSA assay carried out with the purified THAP domain from human THAP1 and labelled oligonucleotides bearing the wild type THRE sequence (5′-AGCAAGTAAGGGCAAACTACTTCAT-3′) (SEQ ID NO: 313) in the presence of increasing amounts of unlabelled THRE or non-specific competitor oligonucleotides (wild-type THRE, 5 ′-AGCAAGTAAGGGCAAACTACTTCAT-3′ (SEQ ID NO: 313) non-specific competitor, 5′-AGCAAGTAATTTCAAACTACTTCAT-3′) (SEQ ID NO: 314).

[0713] FIG. 26A shows the results of an EMSA assay carried out with the purified THAP domain from human THAP1 and labelled oligonucleotides bearing the wild type THRE sequence (5′-AGCAAGTAAGGGCAAACTACTTCAT-3′) (SEQ ID NO: 313) in the presence of metal chelators EDTA (5 mM or 50 mM) or 1,10 phenanthroline (vehicle alone, 1 mM or 5 mM).

[0714] FIG. 26B shows the results of an EMSA assay carried out with the purified THAP domain from human THAP1 and labelled oligonucleotides bearing the wild type THRE sequence (5′-AGCAAGTAAGGGCAAACTACTTCAT-3′) (SEQ ID NO: 313) in the presence of metal chelator 1,10 phenanthroline (5 mM+Phe) and increasing amounts of Zn2⁺ (100 μM or 500 μM) or Mg2⁺ (100 μM or 500 μM).

[0715] FIG. 27A-D depicts micrographs of human Hela cells transfected with the GFP-SLC (A) and GFP-MIG (green fluorescence) (C) expression constructs. To reveal the nuclear localization of the chemokines SLC and MIG, nuclei were counterstained with DAPI (blue) (B and D).

[0716] FIG. 28A-D depicts micrographs of human U2OS cells transfected with the secreted MIG (red fluorescence) expression construct (phMIG-Flag) in the presence of a CXCR3 expression vector (pEF-CXCR3) (28C) or a control vector (pEF-puro) (28A). To reveal the nuclear localization of chemokine MIG, nuclei were counterstained with DAPI (blue) (B and D).

[0717] FIG. 29A-C depicts micrographs of human U2OS cells transfected with the secreted MIG expression construct (phMIG-Flag) in the presence of a CXCR3 expression vector (pEF-CXCR3). MIG chemokine and CXCR3 expression were detected with anti-Flag (red fluorescence) (A) and anti-CXCR3 antibodies (green fluorescence) (B). To reveal the nuclear localization of chemokine MIG, nuclei were counterstained with DAPI (blue) (C).

[0718] FIG. 30 shows the nucleotide sequence of the human Survivin promoter (GenBank Accession Number NT 010641.14, nucleotides 10102350-10102668) (SEQ ID NO: 315). The sequence corresponding to the mRNA is underlined and the initiation codon (ATG) is indicated in italics (nt 210-212). The promoter contains a DR5-type THAP1 responsive element in the antisense orientation (GGGCAAnnnnnGGGCAC) (SEQ ID NO: 316), that is indicated in bold.

[0719] FIG. 31 shows the nucleotide sequence of the human Ubiquitin specific protease 16 promoter (EPD database, which can be accessed by typing in the address bar of a web brower “http://www.epd.” immediately followed by “isb-sib.ch”), Accession Number EP73421, nucleotides −499-to +100) (SEQ ID NO: 317). The sequence corresponding to the mRNA is underlined. The promoter contains, near the TATA box, a consensus THAP1 responsive element (THRE-11nt) in the antisense orientation (AGTGTGGGCAT) (SEQ ID NO: 318), that is indicated in bold and underlined.

### DETAILED DESCRIPTION OF THE INVENTION

[0720] THAP and PAR4 Biological Pathways

[0721] As mentioned above, the inventors have discovered a novel class of proteins involved in apoptosis. Then, the inventors have also linked a member of this novel class to another (PAR4) apoptosis pathway, and further linked both of these pathways to PML-NBs. Moreover, the inventors have also linked both of these pathways to endothelial cells, providing a range of novel and potentially selective therapeutic treatments. In particular, it has been discovered that THAP1 (THanatos (death)-Associated-Protein-1) localizes to PML-NBs. Furthermore, two hybrid screening of an HEVEC cDNA library with the THAP1 bait lead to the identification of a unique interacting partner, the pro-apoptotic protein PAR4. PAR4 is also found to accumulate into PML-NBs. Targeting of the THAP-1/PAR4 complex to PML-NBs is mediated by PML. Similarly to PAR4, THAP1 has a pro-apoptotic activity. This activity includes a novel motif in the amino-terminal part called THAP domain. Together these results define a novel PML-NBs pathway for apoptosis that involves the THAP1/PAR4 pro-apoptotic complex.

[0722] THAP-family Members, and Uses Thereof

[0723] The present invention includes polynucleotides encoding a family of pro-apoptotic polypeptides THAP-0 to THAP11, and uses thereof for the modulation of apoptosis-related and other THAP-mediated activities. Included is THAP1, which forms a complex with the pro-apoptotic protein PAR4 and localizes in discrete subnuclear domains known as PML nuclear bodies. Additionally, THAP-family polypeptides can be used to alter or otherwise modulate bioavailability of SLC/CCL21 (SLC).

[0724] The present invention also includes a novel protein motif, the THAP domain, which is found in an 89 amino acid domain in the amino-terminal part of THAP1 and which is involved in THAP1 pro-apoptotic activity. The THAP domain defines a novel family of proteins, the THAP-family, with at least twelve distinct members in the human genome (THAP-0 to THAP11), which all contain a THAP domain in their amino-terminal part. The present invention thus pertains to nucleic acid molecules, including genomic and in particular the complete cDNA sequences, encoding members of the THAP-family, as well as with the corresponding translation products, nucleic acids encoding THAP domains, homologues thereof, nucleic acids encoding at least 10, 12, 15, 20, 25, 30, 40, 50, 100, 150 or 200 consecutive amino acids, to the extent that said span is consistent with the particular SEQ ID NO, of a sequence selected from the group consisting of SEQ ID NOs: 160-175.

[0725] THAP1 has been identified based on its expression in HEVs, specialized postcapillary venules found in lymphoid tissues and nonlymphoid tissues during chronic inflammatory diseases that support a high level of lymphocyte extravasation from the blood. An important element in the cloning of the THAP1 cDNA from HEVECs was the development of protocols for obtaining HEVECs RNA, since HEVECs are not capable of maintaining their phenotype outside of their native environment for more than a few hours. A protocol was developed where total RNA was obtained from HEVECs freshly purified from human tonsils. Highly purified HEVECs were obtained by a combination of mechanical and enzymatic procedures, immunomagnetic depletion and positive selection. Tonsils were minced finely with scissors on a steel screen, digested with collagenase/dispase enzyme mix and unwanted contaminating cells were then depleted using immunomagnetic depletion. HEVECs were then selected by immunomagnetic positive selection with magnetic beads conjugated to the HEV-specific antibody MECA-79. From these HEVEC that were 98% MECA-79-positive, 1 μg of total RNA was used to generate full length cDNAs for THAP1 cDNA cloning and RT-PCR analysis.

[0726] As used herein, the term “nucleic acids” and “nucleic acid molecule” is intended to include DNA molecules (e.g., cDNA or genomic DNA) and RNA molecules (e.g., mRNA) and analogs of the DNA or RNA generated using nucleotide analogs. The nucleic acid molecule can be single-stranded or double-stranded, but preferably is double-stranded DNA. Throughout the present specification, the expression “nucleotide sequence” may be employed to designate indifferently a polynucleotide or a nucleic acid. More precisely, the expression “nucleotide sequence” encompasses the nucleic material itself and is thus not restricted to the sequence information (i.e. the succession of letters chosen among the four base letters) that biochemically characterizes a specific DNA or RNA molecule. Also, used interchangeably herein are terms “nucleic acids”, “oligonucleotides”, and “polynucleotides”.

[0727] An “isolated” nucleic acid molecule is one which is separated from other nucleic acid molecules which are present in the natural source of the nucleic acid. Preferably, an “isolated” nucleic acid is free of sequences which naturally flank the nucleic acid (i.e., sequences located at the 5′ and 3′ ends of the nucleic acid) in the genomic DNA of the organism from which the nucleic acid is derived. For example, in various embodiments, the isolated THAP-family nucleic acid molecule can contain less than about 5 kb, 4 kb, 3 kb, 2 kb, 1 kb, 0.5 kb or 0.1 kb of nucleotide sequences which naturally flank the nucleic acid molecule in genomic DNA of the cell from which the nucleic acid is derived. Moreover, an “isolated” nucleic acid molecule, such as a cDNA molecule, can be substantially free of other cellular material, or culture medium when produced by recombinant techniques, or substantially free of chemical precursors or other chemicals when chemically synthesized. A nucleic acid molecule of the present invention, e.g., a nucleic acid molecule having the nucleotide sequence of SEQ ID NOs: 160-175, a portion thereof, can be isolated using standard molecular biology techniques and the sequence information provided herein. Using all or a portion of the nucleic acid sequence of SEQ ID NOs: 160-175, as a hybridization probe, THAP-family nucleic acid molecules can be isolated using standard hybridization and cloning techniques (e.g., as described in Sambrook, J., Fritsh, E. F., and Maniatis, T. Molecular Cloning. A Laboratory Manual. 2nd, ed., Cold Spring Harbor Laboratory, Cold Spring Harbor Laboratory Press, Cold Spring Harbor, N.Y., 1989).

[0728] Moreover, a nucleic acid molecule encompassing all or a portion of e.g. SEQ ID NOs: 160-175, can be isolated by the polymerase chain reaction (PCR) using synthetic oligonucleotide primers designed based upon the sequence of SEQ ID NOs: 160-175.

[0729] A nucleic acid of the invention can be amplified using cDNA, mRNA or alternatively, genomic DNA, as a template and appropriate oligonucleotide primers according to standard PCR amplification techniques. The nucleic acid so amplified can be cloned into an appropriate vector and characterized by DNA sequence analysis. Furthermore, oligonucleotides corresponding to THAP-family nucleotide sequences can be prepared by standard synthetic techniques, e.g., using an automated DNA synthesizer.

[0730] As used herein, the term “hybridizes to” is intended to describe conditions for moderate stringency or high stringency hybridization, preferably where the hybridization and washing conditions permit nucleotide sequences at least 60% homologous to each other to remain hybridized to each other. Preferably, the conditions are such that sequences at least about 70%, more preferably at least about 80%, even more preferably at least about 85%, 90%, 95% or 98% homologous to each other typically remain hybridized to each other. Stringent conditions are known to those skilled in the art and can be found in Current Protocols in Molecular Biology, John Wiley & Sons, N.Y. (1989), 6.3.1-6.3.6. A preferred, non-limiting example of stringent hybridization conditions are as follows: the hybridization step is realized at 65° C. in the presence of 6×SSC buffer, 5× Denhardt's solution, 0,5% SDS and 100 μg/ml of salmon sperm DNA. The hybridization step is followed by four washing steps:

[0731] two washings during 5 min, preferably at 65° C. in a 2×SSC and 0.1% SDS buffer;

[0732] one washing during 30 min, preferably at 65° C. in a 2×SSC and 0.1% SDS buffer,

[0733] one washing during 10 min, preferably at 65° C. in a 0.1×SSC and 0.1% SDS buffer,

[0734] these hybridization conditions being suitable for a nucleic acid molecule of about 20 nucleotides in length. It will be appreciated that the hybridization conditions described above are to be adapted according to the length of the desired nucleic acid, following techniques well known to the one skilled in the art, for example be adapted according to the teachings disclosed in Hames B. D. and Higgins S. J. (1985) Nucleic Acid Hybridization: A Practical Approach. Hames and Higgins Ed., IRL Press, Oxford; and Current Protocols in Molecular Biolog (supra). Preferably, an isolated nucleic acid molecule of the invention that hybridizes under stringent conditions to a sequence of SEQ ID NOs: 160-175 corresponds to a naturally-occurring nucleic acid molecule. As used herein, a “naturally-occurring” nucleic acid molecule refers to an RNA or DNA molecule having a nucleotide sequence that occurs in nature (e.g., encodes a natural protein).

[0735] To determine the percent homology of two amino acid sequences or of two nucleic acids, the sequences are aligned for optimal comparison purposes (e.g., gaps can be introduced in the sequence of a first amino acid or nucleic acid sequence for optimal alignment with a second amino or nucleic acid sequence and non-homologous sequences can be disregarded for comparison purposes). In a preferred embodiment, the length of a reference sequence aligned for comparison purposes is at least 30%, preferably at least 40%, more preferably at least 50%, even more preferably at least 60%, and even more preferably at least 70%, 80%, 90% or 95% of the length of the reference sequence (e.g., when aligning a second sequence to e.g. a THAP-1 amino acid sequence of SEQ ID NO: 3 having 213 amino acid residues, at least 50, preferably at least 100, more preferably at least 200, amino acid residues are aligned or when aligning a second sequence to the THAP-1 cDNA sequence of SEQ ID NO: 160 having 2173 nucleotides or nucleotides 202-835 which encode the amino acids of the THAP1 protein, preferably at least 100, preferably at least 200, more preferably at least 300, even more preferably at least 400, and even more preferably at least 500, 600, at least 700, at least 800, at least 900, at least 1000, at least 1200, at least 1400, at least 1600, at least 1800, or at least 2000 nucleotides are aligned. The amino acid residues or nucleotides at corresponding amino acid positions or nucleotide positions are then compared. When a position in the first sequence is occupied by the same amino acid residue or nucleotide as the corresponding position in the second sequence, then the molecules are homologous at that position (i.e., as used herein amino acid or nucleic acid “identity” is equivalent to amino acid or nucleic acid “homology”). The percent homology between the two sequences is a function of the number of identical positions shared by the sequences (i.e., % homology=number (#) of identical positions/total number (#) of positions 100).

[0736] The comparison of sequences and determination of percent homology between two sequences can be accomplished using a mathematical algorithm. A preferred, non-limiting example of a mathematical algorithm utilized for the comparison of sequences is the algorithm of Karlin and Altschul (1990) Proc. Natl. Acad. Sci. USA 87:2264-68, modified as in Karlin and Altschul (1993) Proc. Natl. Acad. Sci. USA 90:5873-77, the disclosures of which are incorporated herein by reference in their entireties. Such an algorithm is incorporated into the NBLAST and XBLAST programs (version 2.0) of Altschul, et al. (1990) J. Mol. Biol. 215:403-10. BLAST nucleotide searches can be performed with the NBLAST program, score=100, wordlength=12 to obtain nucleotide sequences homologous to THAP-family nucleic acid molecules of the invention. BLAST protein searches can be performed with the XBLAST program, score=50, wordlength=3 to obtain amino acid sequences homologous to THAP-family protein molecules of the invention. To obtain gapped alignments for comparison purposes, Gapped BLAST can be utilized as described in Altschul et al., (1997) Nucleic Acids Research 25(17):3389-3402. When utilizing BLAST and Gapped BLAST programs, the default parameters of the respective programs (e.g., XBLAST and NBLAST) can be used (see, www.ncbi.nlm.nih.gov, the disclosures of which are incorporated herein by reference in their entireties). Another preferred, non-limiting example of a mathematical algorithim utilized for the comparison of sequences is the algorithm of Myers and Miller, CABIOS (1989), the disclosures of which are incorporated herein by reference in their entireties. Such an algorithm is incorporated into the ALIGN program (version 2.0) which is part of the GCG sequence alignment software package. When utilizing the ALIGN program for comparing amino acid sequences, a PAM120 weight residue table, a gap length penalty of 12, and a gap penalty of 4 can be used.

[0737] The term “polypeptide” refers to a polymer of amino acids without regard to the length of the polymer; thus, peptides, oligopeptides, and proteins are included within the definition of polypeptide. This term also does not specify or exclude post-expression modifications of polypeptides, for example, polypeptides which include the covalent attachment of glycosyl groups, acetyl groups, phosphate groups, lipid groups and the like are expressly encompassed by the term polypeptide. Also included within the definition are polypeptides which contain one or more analogs of an amino acid (including, for example, non-naturally occurring amino acids, amino acids which only occur naturally in an unrelated biological system, modified amino acids from mammalian systems etc.), polypeptides with substituted linkages, as well as other modifications known in the art, both naturally occurring and non-naturally occurring.

[0738] An “isolated” or “purified” protein or biologically active portion thereof is substantially free of cellular material or other contaminating proteins from the cell or tissue source from which the THAP family or THAP domain polypeptide, or a biologically active fragment or homologue thereof protein is derived, or substantially free from chemical precursors or other chemicals when chemically synthesized. The language “substantially free of cellular material” includes preparations of a protein according to the invention (e.g. THAP family or THAP domain polypeptide, or a biologically active fragment or homologue thereof) in which the protein is separated from cellular components of the cells from which it is isolated or recombinantly produced. In one embodiment, the language “substantially free of cellular material” includes preparations of a protein according to the invention having less than about 30% (by dry weight) of protein other than the THAP-family protein (also referred to herein as a “contaminating protein”), more preferably less than about 20% of protein other than the protein according to the invention, still more preferably less than about 10% of protein other than the protein according to the invention, and most preferably less than about 5% of protein other than the protein according to the invention. When the protein according to the invention or biologically active portion thereof is recombinantly produced, it is also preferably substantially free of culture medium, i.e., culture medium represents less than about 20%, more preferably less than about 10%, and most preferably less than about 5% of the volume of the protein preparation.

[0739] The language “substantially free of chemical precursors or other chemicals” includes preparations of THAP family or THAP domain polypeptide, or a biologically active fragment or homologue thereof in which the protein is separated from chemical precursors or other chemicals which are involved in the synthesis of the protein. In one embodiment, the language “substantially free of chemical precursors or other chemicals” includes preparations of a THAP-family protein having less than about 30% (by dry weight) of chemical precursors or non-THAP-family chemicals, more preferably less than about 20% chemical precursors or non-THAP-family or THAP-domain chemicals, still more preferably less than about 10% chemical precursors or non-THAP-family or THAP-domain chemicals, and most preferably less than about 5% chemical precursors or non-THAP-family or THAP-domain chemicals.

[0740] The term “recombinant polypeptide” is used herein to refer to polypeptides that have been artificially designed and which comprise at least two polypeptide sequences that are not found as contiguous polypeptide sequences in their initial natural environment, or to refer to polypeptides which have been expressed from a recombinant polynucleotide.

[0741] Accordingly, another aspect of the invention pertains to anti-THAP-family or THAP-domain antibodies. The term “antibody” as used herein refers to immunoglobulin molecules and immunologically active portions of immunoglobulin molecules, i.e., molecules that contain an antigen binding site which specifically binds (immunoreacts with) an antigen, such as a THAP family or THAP domain polypeptide, or a biologically active fragment or homologue thereof. Examples of immunologically active portions of immunoglobulin molecules include F(ab) and F(ab′)₂ fragments which can be generated by treating the antibody with an enzyme such as pepsin. The invention provides polyclonal and monoclonal antibodies that bind a THAP family or THAP domain polypeptide, or a biologically active fragment or homologue thereof. The term “monoclonal antibody” or “monoclonal antibody composition”, as used herein, refers to a population of antibody molecules that contain only one species of an antigen binding site capable of immunoreacting with a particular epitope of a THAP-family or THAP domain polypeptide. A monoclonal antibody composition thus typically displays a single binding affinity for a particular THAP-family or THAP domain protein with which it immunoreacts.

[0742] PAR4

[0743] As mentioned above, Prostate apoptosis response-4 (PAR4) is a 38 kDa protein initially identified as the product of a gene specifically upregulated in prostate tumor cells undergoing apoptosis (for reviews see Rangnekar, 1998; Mattson et al., 1999). The PAR4 nucleic acid and amino acid sequences, see Johnstone et al, Mol. Cell. Biol. 16(12), 6945-6956 (1996); and Genbank accession no. U63809 (SEQ ID NO: 118).

[0744] As used interchangeably herein, a “PAR4 activity”, “biological activity of a PAR4” or “functional activity of a PAR4”, refers to an activity exerted by a PAR4 protein, polypeptide or nucleic acid molecule as determined in vivo, or in vitro, according to standard techniques. In one embodiment, a PAR4 activity is a direct activity, such as an association with a PAR4-target molecule or most preferably apoptosis induction activity, or inhibition of cell proliferation or cell cycle. As used herein, a “target molecule” is a molecule with which a PAR4 protein binds or interacts in nature, such that PAR4-mediated function is achieved. An example of a PAR4 target molecule is a THAP-family protein such as THAP1 or THAP2, or a PML-NBs protein. A PAR4 target molecule can be a PAR4 protein or polypeptide or a non-PAR4 molecule. For example, a PAR4 target molecule can be a non-PAR4 protein molecule. Alternatively, a PAR4 activity is an indirect activity, such as an activity mediated by interaction of the PAR4 protein with a PAR4 target molecule such that the target molecule modulates a downstream cellular activity (e.g., interaction of a PAR4 molecule with a PAR4 target molecule can modulate the activity of that target molecule on an intracellular signaling pathway).

[0745] Binding or interaction with a PAR4 target molecule (such as THAP1/PAR4 described herein) or with other targets can be detected for example using a two hybrid-based assay in yeast to find drugs that disrupt interaction of the PAR4 bait with the target (e.g. PAR4) prey, or an in vitro interaction assay with recombinant PAR4 and target proteins (e.g. THAP1 and PAR4).

[0746] Chemokines

[0747] Chemokines are important in medicine because they regulate the movement and biological activities of leukocytes in many disease situations, including, but not limited to: allergic disorders, autoimmune diseases, ischemia/reperfusion injury, development of atherosclerotic plaques, cancer (including mobilization of hematopoietic stem cells for use in chemotherapy or myeloprotection during chemotherapy), chronic inflammatory disorders, chronic rejection of transplanted organs or tissue grafts, chronic myelogenous leukemia, and infection by HIV and other pathogens. Antagonists of chemokines or chemokine receptors may be of benefit in many of these diseases by reducing excessive inflammation and immune system responses.

[0748] The activity of chemokines is tightly regulated to prevent excessive inflammation that can cause disease. Inhibition of chemokines by neutralizing antibodies in animal models (Sekido et al. (1993) Nature 365:654-657) or disruption of mouse chemokine genes (Cook et al. (1995) Science 269:1583-1588) have confirmed a critical role of chemokines in vivo in inflammation mediated by virus infection or other processes. The production of soluble versions of cytokine receptors containing only the extracellular binding domain, represents a physiological and therapeutic strategy to block the activity of some cytokines (Rose-John and Heinrich (1994) Biochem J. 300:281-290; Heaney and Golde (1996) Blood 87:847-857). However, the seven transmembrane domain structure of chemokine receptors makes the construction of soluble, inhibitory receptors difficult, and thus antagonists based on mutated chemokines, blocking peptides or antibodies are under evaluation as chemokine inhibitors (D'Souza & Harden (1996) Nature Medecine 2:1293-1300; Howard et al. (1996) Trends Biotech. 14:46-51; Baggiolini (1998) Nature 392:565-568; Rollins (1997) Blood 90:909-928).

[0749] Several viral chemokine binding proteins have been described that may be useful as soluble chemokine inhibitors. Soluble chemokine-binding proteins have been previously detected in poxviruses. Firstly, the myxoma virus T7 protein, which was first identified as a soluble IFN-γ Receptor (Upton et al. (1992) Science 258:1369-1372), binds to a range of chemokines through the heparin-binding domain and affects the infiltration of cells into infected tissue (Lalani et al. (1997) J Virol 71:4356-4363). The protein is described in U.S. Pat. No. 5,834,419 and International Publication No. WO 96/33730, and is designated CBP-1. Secondly, it was demonstrated that VV strain Lister expresses a soluble 35 kDa protein that is secreted from infected cells and which binds many CC chemokines (Graham et al. (1997) Virology 229:12-24; Smith et al. (1997) Virology 236:316-327; Alcami et al (1998) J Immunol 160:624-633), but not CXC chemokines, through a domain distinct from the heparin-binding domain (Smith et al. (1997) Virology 236:316-327; Alcami et al (1998) J Immunol 160:624-633). This protein has been called vCKBP (Alcami et al (1998) J Immunol 160:624-633). The protein is also described in U.S. Pat. No. 5,871,740 and International Publication No. WO97/11714. One main disadvantage to the use of these viral proteins in a clinical setting is that antigenicity severely limits their indications. As such, there is a strong interest in the identification of cellular chemokine-binding proteins

[0750] Some aspects of the present invention relate to cellular polypeptides and homologs thereof, portions of cellular polypeptides and homologs thereof as well as modified cellular polypeptides and homologs thereof that bind to one or more chemokines. In some embodiments of the present invention such cellular polypeptides are THAP-family polypeptides, including THAP-1, chemokine-binding domains of THAP-family polypeptides (including a chemokine-binding domain of THAP-1), THAP-family polypeptide or THAP-family chemokine-binding domain fusions to immunoglobulin Fc (including THAP-1 fused to an immunoglobulin Fc region or a chemokine-binding domain of THAP-1 fused to an immunoglobulin Fc region), oligomers of THAP-family polypeptides or THAP-family chemokine-binding domains (including THAP-1 oligomers or oligomers of a chemokine-binding domain of THAP-1), or homologs of any of the above-listed compositions. Throughout this disclosure, the above-listed polypeptides are referred to as THAP-type chemokine-binding agents. Each of these THAP-type chemokine-binding agents are described in detail below.

[0751] SLC/CCL21 (SLC)

[0752] Biological Roles of SLC

[0753] The signals which mediate T-cell infiltration during T-cell auto-immune diseases are poorly understood. SLC/CCL21 (SEQ ID NO: 119) is highly potent and highly specific for attracting T-cell migration. It was initially thought to be expressed only in secondary lymphoid organs, directing naive T-cells to areas of antigen presentation. However, using immunohistology it was found that expression of CCL21 was highly induced in endothelial cells of T-cell auto-immune infiltrative skin diseases (Christopherson et al. (2002) Blood electronic publication prior to printed publication). No other T-cell chemokine was consistently induced in these T cell skin diseases. The receptor for CCL21, CCR7, was also found to be highly expressed on the infiltrating T-cells, the majority of which expressed the memory CD45Ro phenotype. Inflamed venules endothelial cells expressing SLC/CCL21 in T cell infiltrative autoimmune skin diseases may therefore play a key role in the regulation of T-cell migration into these tissues.

[0754] There are a number of other autoimmune diseases where induced expression of SLC/CCL21 in endothelial cells may cause abnormal recruitment of T-cells from the circulation to sites of pathologic inflammation. For instance, chemokine SLC/CCL21 appears to be important for aberrant T-cell infiltration in experimental autoimmune encephalomyelitis (EAE), an animal model for multiple sclerosis (Alt et al. (2002) Eur J Immunol 32:2133-44). Migration of autoaggressive T cells across the blood-brain barrier (BBB) is critically involved in the initiation of EAE. The direct involvement of chemokines in this process was suggested by the observation that G-protein-mediated signaling is required to promote adhesion strengthening of encephalitogenic T cells on BBB endothelium in vivo. A search for chemokines present at the BBB, by in situ hybridizations and immunohistochemistry revealed expression of the lymphoid chemokines CCL19/ELC and CCL21/SLC in venules surrounded by inflammatory cells (Alt et al. (2002) Eur J Immunol 32:2133-44). Their expression was paralleled by the presence of their common receptor CCR7 in inflammatory cells in brain and spinal cord sections of mice afflicted with EAE. Encephalitogenic T cells showed surface expression of CCR7 and specifically chemotaxed towards both CCL19 or CCL21 in a concentration dependent and pertussis toxin-sensitive manner comparable to naive lymphocytes in vitro. Binding assays on frozen sections of EAE brains demonstrated a functional involvement of CCL19 and CCL21 in adhesion strengthening of encephalitogenic T lymphocytes to inflamed venules in the brain (Alt et al. (2002) Eur J Immunol 32:2133-44). Taken together these data suggested that the lymphoid chemokines CCL19 and CCL21 besides regulating lymphocyte homing to secondary lymphoid tissue are involved in T lymphocyte migration into the immunoprivileged central nervous system during immunosurveillance and chronic inflammation.

[0755] Other diseases where induced expression of SLC/CCL21 in venular endothelial cells has been observed include rheumatoid arthritis (Page et al. (2002) J Immunol 168:5333-5341) and experimental autoimmune diabetes (Hjelmstrom et al. (2000) Am J Path 156:1133-1138). Therefore, chemokine SLC/CCL21 may be an important pharmacological target in T-cell auto-immune diseases. Inhibitors of SLC/CCL21 may be effective agents at treating these T cell infiltrative diseases by interfering with the abnormal recruitment of T cells, from the circulation to sites of pathologic inflammation, by endothelial cells expressing SLC/CCL21. The reduction in T cell migration into involved tissue would reduce the T-cell inflicted damage seen in those diseases.

[0756] Ectopic lymphoid tissue formation is a feature of many chronic inflammatory diseases, including rheumatoid arthritis, inflammatory bowel diseases (Crohn's disease, ulcerative colitis), autoimmune diabetes, chronic inflammatory skin diseases (lichen panus, psoriasis, . . . ), Hashimoto's thyroiditis, Sjogren's syndrome, gastric lymphomas and chronic inflammatory liver disease (Girard and Springer (1995) Immunol today 16:449-457; Takemura et al. (2001) J Immunol 167:1072-1080; Grant et al. (2002) Am J Pathol 2002 160:1445-55; Yoneyama et al. (2001) J Exp Med 193:35-49).

[0757] Ectopic expression of SLC/CCL21 has been shown to induce lymphoid neogenesis, both in mice and in human inflammatory diseases. In mice, transgenic expression of SLC/CCL21 in the pancreas (Fan et al. (2000) J Immunol 164:3955-3959; Chen et al. (2002) J Immunol 168:1001-1008; Luther et al. (2002) J Immunol 169:424-433), a non-lymphoid tissue, has been found to be sufficient for the development and organization of ectopic lymphoid tissue through differential recruitment of T and B lymphocytes and induction of high endothelial venules, specialized blood vessels for lymphocyte migration (Girard and Springer (1995) Immunol today 16:449-457). In humans, hepatic expression of SLC/CCL21 has been shown to promote the development of high endothelial venules and portal-associated lymphoid tissue in chronic inflammatory liver disease (Grant et al. (2002) Am J Pathol 2002 160:1445-55; Yoneyama et al. (2001) J Exp Med 193:35-49). The chronic inflammatory liver disease primary sclerosing cholangitis (PSC) is associated with portal inflammation and the development of neolymphoid tissue in the liver. More than 70% of patients with PSC have a history of inflammatory bowel disease and strong induction of SLC/CCL21 on CD34(+) vascular endothelium in portal associated lymphoid tissue in PSC has been reported (Grant et al. (2002) Am J Pathol 2002 160:1445-55). In contrast, CCL21 is absent from LYVE-1(+) lymphatic vessel endothelium. Intrahepatic lymphocytes in PSC include a population of CCR7(+) T cells only half of which express CD45RA and which respond to CCL21 in migration assays. The expression of CCL21 in association with mucosal addressin cell adhesion molecule-1 in portal tracts in PSC may promote the recruitment and retention of CCR7(+) mucosal lymphocytes leading to the establishment of chronic portal inflammation and the expanded portal-associated lymphoid tissue. These findings are supported by studies in an animal model of chronic hepatic inflammation, that have shown that anti-SLC/CCL21 antibodies prevent the development of high endothelial venules and portal-associated lymphoid tissue (Yoneyama et al. (2001) J Exp Med 193:35-49).

[0758] Induction of chemokine SLC/CCL21 at a site of inflammation could convert the lesion from an acute to a chronic state with corresponding development of ectopic lymphoid tissue. Blocking chemokine SLC/CCL21 activity in chronic inflammatory diseases may therefore have significant therapeutic value.

[0759] Chemokine SLC/CCL21 and Regulation of Cell Proliferation and Cell Death

[0760] In addition to its key role in chemotaxis and cell migration, chemokine SLC/CCL21 has also been shown to regulate cell proliferation and cell death. For instance, the proliferation rate of normal hematopoietic or leukemia progenitor cells was reduced upon stimulation with SLC/CCL21 (Hromas et al. (1997) J Immunol 159 :2554-2558; Hromas et al. (2000) Blood 95 :1506-1508). In contrast, SLC/CCL21 stimulated proliferation of mesangial cells from human kidney (Banas et al. (2002) J Immunol 168 :4301-4307), suggesting differential action of this chemokine on hematopoietic or non-hematopoietic cells.

[0761] SLC/CCL21 has also been shown to inhibit cell death. It was found that pretreatment with small doses of SLC/CCL21 prevented the death of normal murine marrow progenitors from the toxic effects of the chemotherapeutic agent Ara-C (Hromas et al. (2002) Cancer Chemother Pharmacol 50 :163-166). In addition, SLC/CCL21 was found to act as anti-apoptotic factor that promotes mesengial cells survival in cell death assays. It is not known whether SLC/CCL21 effects on cell proliferation and cell death require the CCR7 chemokine receptor or are mediated by other cellular receptors.

[0762] Chemokine SLC/CCL21 and Regulation of Endothelial Cell Differentiation (Induction of the Specialized High Endothelial Venule Phenotype)

[0763] Chemokine SLC/CCL21 has been shown to act on endothelial cells in two ways: 1) It exhibits angiostatic (anti-angiogenic) properties and efficiently block blood vessel formation in vivo (Soto et al. (1998) PNAS 95:8205-8210; Vicari et al. (2000) 165:1992-2000); 2) It induces differentiation of ‘flat’ endothelial cells into high endothelial venules (HEV), specialized blood vessels for lymphocyte migration (Girard and Springer (1995) Immunol today 16:449-457). For instance, in transgenic mice, ectopic expression of SLC/CCL21 in the pancreas (Fan et al. (2000) J Immunol 164:3955-3959; Chen et al. (2002) J Immunol 168:1001-1008; Luther et al. (2002) J Immunol 169:424-433), has been found to be sufficient for induction of high endothelial venules and associated lymphoid tissue. In humans, hepatic expression of SLC/CCL21 has been shown to promote the development of high endothelial venules and portal-associated lymphoid tissue in chronic inflammatory liver disease (Grant et al. (2002) Am J Pathol 2002 160:1445-55; Yoneyama et al. (2001) J Exp Med 193:35-49). A critical role for SLC/CCL21 in induction of high endothelial venules is supported by studies in an animal model of chronic hepatic inflammation, that have shown that anti-SLC/CCL21 antibodies prevent the development of high endothelial venules and portal-associated lymphoid tissue (Yoneyama et al. (2001) J Exp Med 193:35-49).

[0764] Induction of chemokine SLC/CCL21 at a site of inflammation might convert the lesion from an acute to a chronic state with corresponding development of high endothelial venules and ectopic lymphoid tissue. Blocking chemokine SLC/CCL21 effects on endothelial cells in chronic inflammatory diseases may therefore have significant therapeutic value. Since the CCR7 chemokine receptor is not expressed in endothelial cells, the effects of SLC/CCL21 on endothelial cells are likely to be mediated by other mechanisms. There is therefore a strong interest in the identification of other cellular receptors for SLC/CCL21.

[0765] Chemokines MIG/CXCL9, IP10/CXCL10, 1-TAC/CXCL11

[0766] Roles of Chemokines MIG/CXCL9, IP10/CXCL10, 1-TAC/CXCL11 in Leukocyte Chemotaxis

[0767] Chemokines monokine induced by IFN-γ (Mig/CXCL9), IFN-induced protein of 10 kDa (IP-10/CXCL10) and IFN-inducible T cell α-chemoattractant (1-TAC/CXCL11) are three CXC chemokines more closely related to each other than to any other chemokine with an amino acid sequence identity of about 40% (Luster and Ravetch (1987) J Exp Med 166:1084; Cole et al. (1998) J Exp Med 187 :2009-2021; Farber (1993) BBRC 192:223-230). They share a number of features: i) they lack the glutamic acid-leucine-arginine (ELR) motif preceding the first conserved cysteine and are therefore inactive towards neutrophils; ii) they share an individual branch of the phylogenetic tree, have a similar gene structure, and are clustered on chromosome 4q21.2 (O'Donovan et al. (1999) Cytogenet Cell Genet 84:39-42). Among the CXC members, CXCL9, CXCL10 and CXCL1 are unique in that they are all induced by IFN-γ in a wide variety of cell types, including endothelial cells (Luster and Ravetch (1987) J Exp Med 166:1084; Farber (1997) J Leuk Biol 61:246-257; Mach et al. (1999) J Clin Invest 104:1041; Cole et al. (1998) J Exp Med 187 :2009-2021; Loetscher et al. (1998) Eur J Immunol 28:3696-3705), and act through a unique chemokine receptor, CXCR3. CXCR3 is expressed on activated T cells, preferentially of the Th1 phenotype, NK cells, and on a significant fraction (˜20-40%) of circulating CD4⁺ and CD8⁺ T cells (Loetscher et al. (1996) J Exp Med 184:963-969; Loetscher et al. (1998) Eur J Immunol 28:3696-3705). The majority of peripheral CXCR3+T cells express CD45RO (memory T cells) as well as β₁ integrins (Qin et al. (1998) J Clin Invest 101:746) which are implicated in the binding of lymphocytes to endothelial cells and the extracellular matrix. In addition, CXCR3 has been reported to be expressed on plasmacytoid dendritic cells, leukemic B cells, eosinophils, and dividing microvascular endothelial cells (Cella et al. (1999) Nat Med 5:919; Romagnani et al. (2001) J Clin Invest 107:53).

[0768] CXCR3⁺ cells accumulate at sites of Th1-type inflammation where IFN-γ is highly expressed, including atherosclerosis, sarcoidosis, inflammatory bowel diseases, and rheumatoid arthritis (Qin et al. (1998) J Clin Invest 101:746; Mach et al. (1999) J Clin Invest 104:1041). IP-10 has been found to be highly expressed in a number of Th1-type inflammatory diseases, including psoriasis , tuberculoid leprosy, sarcoidosis, and viral meningitis. In addition, IFN-γ-stimulated endothelial cells and endothelium from atherosclerotic lesions are a rich source of IP-10, Mig, and I-TAC suggesting an important role for these chemokines in the transendothelial migration and local retention of CXCR3⁺ cells found in atherosclerotic lesions (Mach et al. (1999) J Clin Invest 104:1041). In support of this hypothesis, IP-10 and Mig induce the rapid adhesion of IL-2-activated T cells to immobilized VCAM-1 and ICAM-1, and IP-10, Mig, and I-TAC are potent chemotactic agents for activated T cells.

[0769] Roles of Chemokines MIG/CXCL9, IP10/CXCL10, I-TAC/CXCL11 in Angiogenesis

[0770] CXC chemokines MIG/CXCL9, IP10/CXCL10, I-TAC/CXCL11 exhibit the selective property to inhibit angiogenesis (Belperio et al. (2000) J Leukoc Biol 68:1-8). These angiostatic chemokines induce injury to established tumor-associated vasculature and promote extensive tumor necrosis (Arenberg et al. (1996) J Exp Med 184:981-992; Sgadari et al. (1997) Blood 89:2635-2643) and thus have been proposed as useful therapeutic agents in cancer.

[0771] The angiostatic effects of CXCL9, CXCL10, and CXCL11 on human microvascular endothelial cells (HMVEC) are mediated by CXCR3 (Romagnani et al. (2001) J Clin Invest 107:53-63; Lasagni et al. (2003) J Exp Med 197 :1537-1549). A distinct, previously unrecognized alternatively spliced variant of CXCR3 named CXCR3-B, has recently been shown to mediate the angiostatic activity of CXCR3 ligands (Lasagni et al. (2003) J Exp Med 197 :1537-1549). Human microvascular endothelial cell line-1 (HMEC-1), transfected with either the known CXCR3 (renamed CXCR3-A) or CXCR3-B, bound CXCL9, CXCL10, and CXCL11. Overexpression of CXCR3-A induced an increase of survival, whereas overexpression of CXCR3-B dramatically reduced DNA synthesis and up-regulated apoptotic HMEC-1 death through activation of distinct signal transduction pathways. Unlike CXCR3A, CXCR3B was not found to be coupled to G-proteins. Remarkably, primary cultures of human microvascular endothelial cells, whose growth is inhibited by CXCL9, CXCL10 and CXCL11, expressed CXCR3-B, but not CXCR3-A. Finally, monoclonal antibodies raised to selectively recognize CXCR3-B reacted with endothelial cells from neoplastic tissues, providing evidence that CXCR3-B is also expressed in vivo and may account for the angiostatic effects of CXC chemokines.

[0772] Chemokine MIG/CXCL9 and Chemokine Receptor CXCR3 and Regulation of Endothelial Cell Differentiation (Induction of the Specialized High Endothelial Venule Phenotype)

[0773] During inflammation, chemokine MIG/CXCL9 has been shown to be induced in high endothelial venules (HEV, Girard and Springer (1995) Immunol today 16:449-457), specialized blood vessels for lymphocyte migration (Janatpour et al. (2001) J Exp Med 193:1375-1384). Interestingly, in many human chronic inflammatory diseases, including Crohn's disease, Graves's disease and glomerulonephritis, CXCR3 receptor has also been found to be upregulated on endothelial cells during transformation of small blood vessels into HEV-like vessels (Romagnani et al. (2001) J Clin Invest 107:53-63).

[0774] Induction of chemokine MIG/CXCL9 and its receptor CXCR3 on endothelial cells at a site of inflammation might convert the lesion from an acute to a chronic state with corresponding development of high endothelial venules and ectopic lymphoid tissue. Blocking chemokine MIG/CXCL9 effects on CXCR3+ endothelial cells in chronic inflammatory diseases may therefore have significant therapeutic value.

[0775] Role of Chemokines CXCL9/Mig and CXCL10/IP-10 in Vascular Pericyte Proliferation

[0776] CXCL9 and CXCL10 have been implicated in the pathogenesis of proliferative glomerulonephritis, a common renal disease characterized by glomerular hypercellularity, because they induce increased survival and growth of human mesangial cells (HMC) through their receptor CXCR3 (Romagnani et al. (1999) J Am Soc Nephrol 10:2518-2526; Romagnani et al. (2002) J Am Soc Nephrol 13:53-64). High levels of expression of mRNA and protein for CXCL10 and CXCL9 were observed, by using in situ hybridization and immunohistochemical analyses, in kidney biopsy specimens from patients with glomerulonephritis (GN), particularly those with membranoproliferative or crescentic GN, but not in normal kidneys (Romagnani et al. (2002) J Am Soc Nephrol 13:53-64). Double-immunostaining or combined in situ hybridization and immunohistochemical analyses for IP-10, Mig, and proliferating cell nuclear antigen (PCNA) or α-smooth muscle actin (α-SMA) revealed that IP-10 and Mig production by resident glomerular cells was a selective property of glomeruli in which mesangial cells demonstrated active proliferation. IP-10 and Mig mRNA and protein were also expressed by primary cultures of human mesangial cells. Moreover, high levels of CXCR3 were found in mesangial cells from patients with proliferative GN, and CXCR3 was also observed on the surface of cultured human mesangial cells (HMC) and seemed to mediate both intracellular Ca²⁺ influx, cell chemotaxis and cell proliferation, induced by CXCL9 and CXCL10 (Romagnani et al. (1999) J Am Soc Nephrol 10:2518-2526). Therefore, among patients with proliferative GN, the chemokines IP-10 and/or Mig not only may be responsible for the attraction of infiltrating mononuclear cells into the inflamed tissue but also may directly stimulate the proliferation of mesangial cells.

[0777] As used herein, “SLC/CCL21” and “SLC” are synonymous.

[0778] As used herein, “ELC/CCL19”, “CCL19”and “ELC” are synonymous.

[0779] As used herein, “Rantes/CCL5”, “CCL5” and “Rantes” are synonymous.

[0780] As used herein, “MIG/CXCL9”, “CXCL9” and “MIG” are synonymous.

[0781] As used herein, “IP10/CXCL10”, “CXCL10” and “IP10” are synonymous.

[0782] As used herein, “I-TAC/CXCL11”, “CXCL11” and “I-TAC” are synonymous.

[0783] As used herein, in some embodiments of the present invention, “CXCR3” includes CXCR3 splice variant B (polypeptide encoding CXCR3 splice variant B, SEQ ID NO: 517; cDNA encoding CXCR3 splice variant B, Genbank Accession Number: AX805367, SEQ ID NO: 518).

[0784] THAP-family Members Comprising a THAP Domain

[0785] Based on the elucidation of a biological activity of the THAP1 protein in apoptosis as described herein, the inventors have identified and further characterized a novel protein motif, referred to herein as THAP domain. The THAP domain has been identified by the present inventors in several other polypeptides, as further described herein. Knowledge of the structure and function of the THAP domain allows the performing of screening assays that can be used in the preparation or screening of medicaments capable of modulating interaction with a THAP-family-target molecule, modulating cell cycle and cell proliferation, inducing apoptosis or enhancing or participating in the induction of apoptosis.

[0786] As used interchangeably herein, a THAP-family protein or polypeptide, or a THAP-family member refers to any polypeptide having a THAP domain as described herein. As mentioned, the inventors have provided several specific THAP-family members. Thus, as referred to herein, a THAP-family protein or polypeptide, or a THAP-family member, includes but is not limited to a THAP-0, THAP1, THAP-2, THAP-3, THAP-4, THAP-5, THAP-6, THAP-7, THAP-8, THAP-9, THAP10 or a THAP11 polypeptide.

[0787] As used interchangeably herein, a “THAP-family activity”, “biological activity of a THAP-family member” or “functional activity of a THAP-family member”, refers to an activity exerted by a THAP family or THAP domain polypeptide or nucleic acid molecule, or a biologically active fragment or homologue thereof comprising a THAP as determined in vivo, or in vitro, according to standard techniques. In one embodiment, a THAP-family activity is a direct activity, such as an association with a THAP-family-target molecule or most preferably apoptosis induction activity, or inhibition of cell proliferation or cell cycle. As used herein, a “THAP-family target molecule” is a molecule with which a THAP-family protein binds or interacts in nature, such that a THAP family-mediated function is achieved. For example, a THAP family target molecule can be another THAP-family protein or polypeptide which is substantially identical or which shares structural similarity (e.g. forming a dimer or multimer). In another example, a THAP family target molecule can be a non-THAP family comprising protein molecule, or a non-self molecule such as for example a Death Domain receptor. Binding or interaction with a THAP family target molecule (such as THAP1/PAR4 described herein) or with other targets can be detected for example using a two hybrid-based assay in yeast to find drugs that disrupt interaction of the THAP family bait with the target (e.g. PAR4) prey, or an in vitro interaction assay with recombinant THAP family and target proteins (e.g. THAP1 and PAR4). In yet another example, a THAP family target molecule can be a nucleic acid molecule. For instance, a THAP family target molecule can be DNA.

[0788] Alternatively, a THAP-family activity may be an indirect activity, such as an activity mediated by interaction of the THAP-family protein with a THAP-family target molecule such that the target molecule modulates a downstream cellular activity (e.g., interaction of a THAP-family molecule with a THAP-family target molecule can modulate the activity of that target molecule on an intracellular signaling pathway).

[0789] THAP-family activity is not limited to the induction of apoptotic activity, but may also involve enhancing apoptotic activity. As death domains may mediate protein-protein interactions, including interactions with other death domains, THAP-family activity may involve transducing a cytocidal signal.

[0790] Assays to detect apoptosis are well known. In a preferred example, an assay is based on serum-withdrawal induced apoptosis in a 3T3 cell line with tetracycline-regulated expression of a THAP family member comprising a THAP domain. Other non-limiting examples are also described.

[0791] In one example, a THAP family or THAP domain polypeptide, or a biologically active fragment or homologue thereof can be the minimum region of a polypeptide that is necessary and sufficient for the generation of cytotoxic death signals. Exemplary assays for apoptosis activity are further provided herein.

[0792] In specific embodiments, PAR4 is a preferred THAP1 and/or THAP2 target molecule. In another aspect, a THAP1 target molecule is a PML-NB protein.

[0793] In further aspects, THAP-domain or a THAP-family polypeptide comprises a DNA binding domain.

[0794] In other aspects, a THAP-family activity is detected by assessing any of the following activities: (1) mediating apoptosis or cell proliferation when expressed in or introduced into a cell, most preferably inducing or enhancing apoptosis, and/or most preferably reducing cell proliferation; (2) mediating apoptosis or cell proliferation of an endothelial cell; (3) mediating apoptosis or cell proliferation of a hyperproliferative cell; (4) mediating apoptosis or cell proliferation of a CNS cell, preferably a neuronal or glial cell; (5) an activity determined in an animal selected from the group consisting of mediating, preferably inhibiting angiogenesis, mediating, preferably inhibiting inflammation, inhibition of metastatic potential of cancerous tissue, reduction of tumor burden, increase in sensitivity to chemotherapy or radiotherapy, killing a cancer cell, inhibition of the growth of a cancer cell, or induction of tumor regression; or (6) interaction with a THAP family target molecule or THAP domain target molecule, preferably interaction with a protein or a nucleic acid. Detecting THAP-family activity may also comprise detecting any suitable therapeutic endpoint discussed herein in the section titled “Methods of Treatment”. THAP-family activity may be assessed either in vitro (cell or non-cell based) or in vivo depending on the assay type and format.

[0795] A THAP domain has been identified in the N-terminal region of the THAP1 protein, from about amino acid 1 to about amino acid 89 of SEQ ID NO: 3 based on sequence analysis and functional assays. A THAP domain has also been identified in THAP2 to THAP0 of SEQ ID NOs: 4-14. However, it will be appreciated that a functional THAP domain may be only a small portion of the protein, about 10 amino acids to about 15 amino acids, or from about 20 amino acids to about 25 amino acids, or from about 30 amino acids to about 35 amino acids, or from about 40 amino acids to about 45 amino acids, or from about 50 amino acids to about 55 amino acids, or from about 60 amino acids to about 70 amino acids, or from about 80 amino acids to about 90 amino acids, or about 100 amino acids in length. Alternatively, THAP domain or THAP family polypeptide activity, as defined above, may require a larger portion of the native protein than may be defined by protein-protein interaction, DNA binding, cell assays or by sequence alignment. A portion of a THAP domain-containing polypeptide from about 110 amino acids to about 115 amino acids, or from about 120 amino acids to 130 amino acids, or from about 140 amino acids to about 150 amino acids, or from about 160 amino acids to about 170 amino acids, or from about 180 amino acids to about 190 amino acids, or from about 200 amino acids to about 250 amino acids, or from about 300 amino acids to about 350 amino acids, or from about 400 amino acids to about 450 amino acids, or from about 500 amino acids to about 600 amino acids, to the extent that said length is consistent with the SEQ ID No, or the full length protein, for example any full length protein in SEQ ID NOs: 1-114, may be required for function.

[0796] As discussed, the invention includes a novel protein domain, including several examples of THAP-family members. The invention thus encompasses a THAP-family member comprising a polypeptide having at least a THAP domain sequence in the protein or corresponding nucleic acid molecule, preferably a THAP domain sequence corresponding to SEQ ID NOs: 1-2. A THAP-family member may comprise an amino acid sequence of at least about 25, 30, 35, 40, 45, 50, 60, 70, 80 to 90 amino acid residues in length, of which at least about 50-80%, preferably at least about 60-70%, more preferably at least about 65%, 75% or 90% of the amino acid residues are identical or similar amino acids-to the THAP consensus domain SEQ ID NOs: 1-2.

[0797] Identity or similarity may be determined using any desired algorithm, including the algorithms and parameters for determining homology which are described herein.

[0798] Optionally, a THAP-domain-containing THAP-family polypeptide comprises a nuclear localization sequence (NLS). As used herein, the term nuclear localization sequence refers to an amino sequence allowing the THAP-family polypeptide to be localized or transported to the cell nucleus. A nuclear localization sequence generally comprises at least about 10, preferably about 13, preferably about 16, more preferably about 19, and even more preferably about 21, 23, 25, 30, 35 or 40 amino acid residues. Alternatively, a THAP-family polypeptide may comprise a deletion of part or the entire NLS or a substitution or insertion in a NLS sequence, such that the modified THAP-family polypeptide is not localized or transported to the cell nucleus.

[0799] Isolated proteins of the present invention, preferably THAP family or THAP domain polypeptides, or a biologically active fragments or homologues thereof, have an amino acid sequence sufficiently homologous to the consensus amino acid sequence of SEQ ID NOs: 1-2. As used herein, the term “sufficiently homologous” refers to a first amino acid or nucleotide sequence which contains a sufficient or minimum number of identical or equivalent (e.g., an amino acid residue which has a similar side chain) amino acid residues or nucleotides to a second amino acid or nucleotide sequence such that the first and second amino acid or nucleotide sequences share common structural domains or motifs and/or a common functional activity. For example, amino acid or nucleotide sequences which share common structural domains have at least about 30-40% identity, preferably at least about 40-50% identity, more preferably at least about 50-60%, and even more preferably at least about 60-70%, 70-80%, 80%, 90%, 95%, 97%, 98%, 99% or 99.8% identity across the amino acid sequences of the domains and contain at least one and preferably two structural domains or motifs, are defined herein as sufficiently homologous. Furthermore, amino acid or nucleotide sequences which share at least about 30%, preferably at least about 40%, more preferably at least about 60%, 70%, 80%, 90%, 95%, 97%, 98%, 99% or 99.8% identity and share a common functional activity are defined herein as sufficiently homologous.

[0800] It be appreciated that the invention encompasses any of the THAP-family polypeptides, as well as fragment thereof, nucleic acids complementary thereto and nucleic acids capable of hybridizing thereto under stringent conditions.

[0801] As used herein. “THAP/chemokine complex” refers to a THAP-family polypeptide or a biologically active fragment thereof in association with a chemokine or a biologically active fragment thereof. In some embodiments, THAP/chemokine complexes include, but are not limited to, THAP1/SLC, THAP1/MIG, THAP1/CXCL10, THAP1/CXCL11, THAP11/CCL19 and THAP1/CCL5.

[0802] THAP-0 to THAP11

[0803] As mentioned, the inventors have identified several THAP-family members, including THAP-0, THAP1, THAP-2, THAP-3, THAP-4, THAP-5, THAP-6, THAP-7, THAP-8, THAP-9, THAP10 and THAP11.

[0804] THAP1 Nucleic Acids

[0805] The human THAP1 coding sequence, which is approximately 639 nucleotides in length shown in SEQ ID NO: 160, encodes a protein which is approximately 213 amino acid residues in length. One aspect of the invention pertains to purified or isolated nucleic acid molecules that encode THAP1 proteins or biologically active portions thereof as further described herein, as well as nucleic acid fragments thereof. Said nucleic acids may be used for example in therapeutic methods and drug screening assays as further described herein.

[0806] The human THAP1 gene is localized at chromosomes 8, 18, 11.

[0807] The THAP1 protein comprises a THAP domain at amino acids 1-89, the role of which in apoptosis is further demonstrated herein. The THAP1 protein comprises an interferon gamma homology motif at amino acids 136-169 of human THAP1 (NYTVEDTMHQRKRIHQLEQQVEKLRKKLKTAQQR) (SEQ ID NO: 178), exhibiting 41% identity in a 34 residue overlap with human interferon gamma (amino acids 98-131). PML-NBs are closely linked to IFN gamma, and many PML-NB components are induced by IFN gamma, with IFN gamma responsive elements in the promoters of the corresponding genes. The THAP1 protein also includes a nuclear localization sequence at amino acids 146-165 of human THAP1 (RKRIHQLEQQVEKLRKKLKT) (SEQ ID NO: 179). This sequence is responsible for localization of THAP1 in the nucleus. As demonstrated in the examples provided herein, deletion mutants of THAP1 lacking this sequence are no longer localized in the cell nucleus. The THAP1 protein further comprises a PAR4 binding motif (LE(X)₁₄ QRXRRQXR(X)₁₁QR/KE) (SEQ ID NO: 180). The core of this motif has been defined experimentally by site directed mutagenesis and by comparison with mouse ZIP/DAP-like kinase (another PAR4 binding partner) it overlaps amino acids 168-175 of human THAP1 but the motif may also include a few residues upstream and downstream.

[0808] ESTs corresponding to THAP1 have been identified, and may be specifically included or excluded from the nucleic acids of the invention. The ESTs, as indicated below by accession number, provide evidence for tissue distribution for THAP1 as follows: AL582975 (B cells from Burkift lymphoma); BG708372 (Hypothalamus); BG563619 (liver); BG497522 (adenocarcinoma); BG616699 (liver); BE932253 (head_neck); AL530396 (neuroblastoma cells).

[0809] An object of the invention is a purified, isolated, or recombinant nucleic acid comprising the nucleotide sequence of SEQ ID NO: 160, complementary sequences thereto, and fragments thereof. The invention also pertains to a purified or isolated nucleic acid comprising a polynucleotide having at least 95% nucleotide identity with a polynucleotide of SEQ ID NO: 160, advantageously 99% nucleotide identity, preferably 99.5% nucleotide identity and most preferably 99.8% nucleotide identity with a polynucleotide of SEQ ID NO: 160, or a sequence complementary thereto or a biologically active fragment thereof. Another object of the invention relates to purified, isolated or recombinant nucleic acids comprising a polynucleotide that hybridizes, under the stringent hybridization conditions defined herein, with a polynucleotide of SEQ ID NO: 160, or a sequence complementary thereto or a variant thereof or a biologically active fragment thereof. In further embodiments, nucleic acids of the invention include isolated, purified, or recombinant polynucleotides comprising a contiguous span of at least 12, 15, 18, 20, 25, 30, 35, 40, 50, 60, 70, 80, 90, 100, 150, 200, 500, or 1000 nucleotides of SEQ ID NO: 160, or the complements thereof.

[0810] Also encompassed is a purified, isolated, or recombinant nucleic acid polynucleotide encoding a THAP1 polypeptide of the invention, as further described herein.

[0811] In another preferred aspect, the invention pertains to purified or isolated nucleic acid molecules that encode a portion or variant of a THAP1 protein, wherein the portion or variant displays a THAP1 activity of the invention. Preferably said portion or variant is a portion or variant of a naturally occurring full-length THAP1 protein. In one example, the invention provides a polynucleotide comprising, consisting essentially of, or consisting of a contiguous span of at least 12, 15, 18, 20, 25, 30, 35, 40, 50, 60, 70, 80, 90, 100, 150, 200, 500, or 1000 nucleotides of SEQ ID NO: 160, wherein said nucleic acid encodes a THAP1 portion or variant having a THAP1 activity described herein. In other embodiments, the invention relates to a polynucleotide encoding a THAP1 portion consisting of 8-20, 20-50, 50-70, 60-100, 100-150, 150-200, 200-205 or 205-212 amino acids of SEQ ID NO: 3, or a variant thereof, wherein said THAP1 portion displays a THAP1 activity described herein.

[0812] The sequence of SEQ ID NO: 160 corresponds to the human THAP1 cDNA. This cDNA comprises sequences encoding the human THAP1 protein (i.e., “the coding region”, from nucleotides 202 to 840, as well as 5′ untranslated sequences (nucleotides 1-201) and 3′ untranslated sequences (nucleotides 841 to 2173).

[0813] Also encompassed by the THAP1 nucleic acids of the invention are nucleic acid molecules which are complementary to THAP1 nucleic acids described herein. Preferably, a complementary nucleic acid is sufficiently complementary to the nucleotide sequence shown in SEQ ID NO: 160, such that it can hybridize to the nucleotide sequence shown in SEQ ID NO: 160, thereby forming a stable duplex.

[0814] Another object of the invention is a purified, isolated, or recombinant nucleic acid encoding a THAP1 polypeptide comprising, consisting essentially of, or consisting of the amino acid sequence of SEQ ID NO: 3, or fragments thereof, wherein the isolated nucleic acid molecule encodes one or more motifs selected from the group consisting of a THAP domain, a THAP1 target binding region, a nuclear localization signal and a interferon gamma homology motif Preferably said THAP1 target binding region is a PAR4 binding region or a DNA binding region. For example, the purified, isolated or recombinant nucleic acid may comprise a genomic DNA or fragment thereof which encodes the polypeptide of SEQ ID NO: 3 or a fragment thereof or a cDNA consisting of, consisting essentially of, or comprising the sequence of SEQ ID NO: 160 or fragments thereof, wherein the isolated nucleic acid molecule encodes one or more motifs selected from the group consisting of a THAP domain, a THAP1-target binding region, a nuclear localization signal and a interferon gamma homology motif. Any combination of said motifs may also be specified. Preferably said THAP1 target binding region is a PAR4 binding region or a DNA binding region. Particularly preferred nucleic acids of the invention include isolated, purified, or recombinant THAP1 nucleic acids comprising, consisting essentially of, or consisting of a contiguous span of at least 12, 15, 18, 20, 25, 30, 35, 40, 50, 60, 70, 80, 90, 100, 150, 200 or 300 nucleotides of a sequence selected from the group consisting of nucleotide positions ranges consisting of 607 to 708, 637 to 696 and 703 to 747 of SEQ ID NO: 160. In preferred embodiments, a THAP1 nucleic acid encodes a THAP1 polypeptide comprising at least two THAP1 functional domains, such as for example a THAP domain and a PAR4 binding region.

[0815] In further preferred embodiments, a THAP1 nucleic acid comprises a nucleotide sequence encoding a THAP domain having the consensus amino acid sequence of the formula of SEQ ID NOs: 1-2. A THAP1 nucleic acid may also encode a THAP domain wherein at least about 95%, 90%, 85%, 50-80%, preferably at least about 60-70%, more preferably at least about 65% of the amino acid residues are identical or similar amino acids-to the THAP domain consensus sequence (SEQ ID NOs: 1-2). The present invention also embodies isolated, purified, and recombinant polynucleotides which encode a polypeptide comprising a contiguous span of at least 6 amino acids, preferably at least 8 or 10 amino acids, more preferably at least 15, 25, 30, 35, 40, 45, 50, 60, 70, 80 or 90 amino acids according to the formula of SEQ ID NO: 1-2.

[0816] The nucleotide sequence determined from the cloning of the THAP1 gene allows for the generation of probes and primers designed for use in identifying and/or cloning other THAP1 family members (e.g. sharing the novel functional domains), as well as THAP1 homologues from other species.

[0817] A nucleic acid fragment encoding a “biologically active portion of a THAP1 protein” can be prepared by isolating a portion of the nucleotide sequence of SEQ ID NO: 160, which encodes a polypeptide having a THAP1 biological activity (the biological activities of the THAP1 proteins described herein), expressing the encoded portion of the THAP1 protein (e.g., by recombinant expression in vitro or in vivo) and assessing the activity of the encoded portion of the THAP1 protein.

[0818] The invention further encompasses nucleic acid molecules that differ from the THAP1 nucleotide sequences of the invention due to degeneracy of the genetic code and encode the same THAP1 proteins and fragment of the invention.

[0819] In addition to the THAP1 nucleotide sequences described above, it will be appreciated by those skilled in the art that DNA sequence polymorphisms that lead to changes in the amino acid sequences of the THAP1 proteins may exist within a population (e.g., the human population). Such genetic polymorphism may exist among individuals within a population due to natural allelic variation. Such natural allelic variations can typically result in 1-5% variance in the nucleotide sequence of a THAP1 gene.

[0820] Nucleic acid molecules corresponding to natural allelic variants and homologues of the THAP1 nucleic acids of the invention can be isolated based on their homology to the THAP1 nucleic acids disclosed herein using the cDNAs disclosed herein, or a portion thereof, as a hybridization probe according to standard hybridization techniques under stringent hybridization conditions.

[0821] Probes based on the THAP1 nucleotide sequences can be used to detect transcripts or genomic sequences encoding the same or homologous proteins. In preferred embodiments, the probe further comprises a label group attached thereto, e.g., the label group can be a radioisotope, a fluorescent compound, an enzyme, or an enzyme co-factor. Such probes can be used as a part of a diagnostic test kit for identifying cells or tissue which misexpress a THAP1 protein, such as by measuring a level of a THAP1-encoding nucleic acid in a sample of cells from a subject e.g., detecting THAP1 mRNA levels or determining whether a genomic THAP1 gene has been mutated or deleted.

[0822] THAP1 Polypeptides

[0823] The term “THAP1 polypeptides” is used herein to embrace all of the proteins and polypeptides of the present invention. Also forming part of the invention are polypeptides encoded by the polynucleotides of the invention, as well as fusion polypeptides comprising such polypeptides. The invention embodies THAP1 proteins from humans, including isolated or purified THAP1 proteins consisting of, consisting essentially of, or comprising the sequence of SEQ ID NO: 3.

[0824] Aspects of the present invention concern the polypeptide encoded by a nucleotide sequence of SEQ ID NO: 160, a complementary sequence thereof or a fragment thereto.

[0825] Another aspect of the present invention embodies isolated, purified, and recombinant polypeptides comprising a contiguous span of at least 6 amino acids, preferably at least 8 to 10 amino acids, more preferably at least 12, 15, 20, 25, 30, 40, 50, or 100 amino acids of SEQ ID NO: 3. In other preferred embodiments the contiguous stretch of amino acids comprises the site of a mutation or functional mutation, including a deletion, addition, swap or truncation of the amino acids in the THAP1 protein sequence. The invention also concerns the polypeptide encoded by the THAP1 nucleotide sequences of the invention, or a complementary sequence thereof or a fragment thereof.

[0826] One aspect of the invention pertains to isolated THAP1 proteins, and biologically active portions thereof, as well as polypeptide fragments suitable for use as immunogens to raise anti-THAP1 antibodies. In one embodiment, native THAP1 proteins can be isolated from cells or tissue sources by an appropriate purification scheme using standard protein purification techniques. In another embodiment, THAP1 proteins are produced by recombinant DNA techniques. Alternative to recombinant expression, a THAP1 protein or polypeptide can be synthesized chemically using standard peptide synthesis techniques.

[0827] Typically, biologically active portions comprise a domain or motif with at least one activity of the THAP1 protein. The present invention also embodies isolated, purified, and recombinant portions or fragments of one THAP1 polypeptide comprising a contiguous span of at least 6 amino acids, preferably at least 8 to 10 amino acids, more preferably at least 12, 15, 20, 25, 30, 40, 50, 100 or 200 amino acids of SEQ ID NO: 3. Also encompassed are THAP1 polypeptide which comprise between 10 and 20, between 20 and 50, between 30 and 60, between 50 and 100, or between 100 and 200 amino acids of SEQ ID NO: 3. In other preferred embodiments the contiguous stretch of amino acids comprises the site of a mutation or functional mutation, including a deletion, addition, swap or truncation of the amino acids in the THAP1 protein sequence.

[0828] A biologically active THAP1 protein may, for example, comprise at least 1, 2, 3, 5, 10, 20 or 30 amino acid changes from the sequence of SEQ ID NO: 3, or may encode a biologically active THAP1 protein comprising at least 1%, 2%, 3%, 5%, 8%, 10% or 15% changes in amino acids from the sequence of SEQ ID NO: 3.

[0829] In a preferred embodiment, the THAP1 protein comprises, consists essentially of, or consists of a THAP domain at amino acid positions 1 to 89 shown in SEQ ID NO: 3, or fragments or variants thereof. In other aspects, a THAP1 polypeptide comprises a THAP1-target binding region, a nuclear localization signal and/or a Interferon Gamma Homology Motif. Preferably a THAP1 target binding region is a PAR4 binding region or a DNA binding region. The invention also concerns the polypeptide encoded by the THAP1 nucleotide sequences of the invention, or a complementary sequence thereof or a fragment thereof. The present invention thus also embodies isolated, purified, and recombinant polypeptides comprising, consisting essentially of or consisting of a contiguous span of at least 6 amino acids, preferably at least 8 to 10 amino acids, more preferably at least 12, 15, 20, 25, 30, 40, 50, 70, 80, 90 or 100 amino acids of an amino acid sequence selected from the group consisting of positions 1 to 90, 136 to 169, 146 to 165 and 168 to 175 of SEQ ID NO: 3. In another aspect, a THAP1 polypeptide may encode a THAP domain wherein at least about 95%, 90%, 85%, 50-80%, preferably at least about 60-70%, more preferably at least about 65% of the amino acid residues are identical or similar amino acids-to the THAP domain consensus sequence (SEQ ID NOs: 1-2). Also encompassed by the present invention are isolated, purified, nucleic acids encoding a THAP1 polypeptide comprising, consisting essentially of, or consisting of a THAP domain at amino acid positions 1 to 90 shown in SEQ ID NO: 3, or fragments or variants thereof.

[0830] In other embodiments, the THAP1 protein is substantially homologous to the sequences of SEQ ID NO: 3, and retains the functional activity of the THAP1 protein, yet differs in amino acid sequence due to natural allelic variation or mutagenesis, as described further herein. Accordingly, in another embodiment, the THAP1 protein is a protein which comprises an amino acid sequence shares more than about 60% but less than 100% homology with the amino acid sequence of SEQ ID NO: 3 and retains the functional activity of the THAP1 proteins of SEQ ID NO: 3, respectively. Preferably, the protein is at least about 30%, 40%, 50%, 60%, 70%, 80%, 85%, 90%, 92%, 95%, 97%, 98%, 99% or 99.8% homologous to SEQ ID NO: 3, but is not identical to SEQ ID NO: 3. Preferably the THAP1 is less than identical (e.g. 100% identity) to a naturally occurring THAP1. Percent homology can be determined as further detailed above.

[0831] THAP-2 to THAP11 and THAP-0 Nucleic Acids

[0832] As mentioned, the invention provides several members of the THAP-family. THAP-2, THAP-3, THAP-4, THAP-5, THAP-6, THAP-7, THAP-8, THAP-9, THAP10, THAP11 and THAP-0 are described herein. The human and mouse nucleotide sequences corresponding to the human cDNA sequences are listed in SEQ ID NOs: 161-171; and the human amino acid sequences are listed respectively in SEQ ID NOs: 4-14. Also encompassed by the invention are orthologs of said THAP-family sequences, including mouse, rat, pig and other orthologs, the amino acid sequences of which are listed in SEQ ID NOs: 16-114 and the cDNA sequences are listed in SEQ ID NOs: 172-175.

[0833] THAP-2

[0834] The human THAP-2 cDNA, which is approximately 1302 nucleotides in length shown in SEQ ID NO: 161, encodes a protein which is approximately 228 amino acid residues in length, shown in SEQ ID NO: 4. One aspect of the invention pertains to purified or isolated nucleic acid molecules that encode THAP-2 proteins or biologically active portions thereof as further described herein, as well as nucleic acid fragments thereof. Said nucleic acids may be used for example in therapeutic methods and drug screening assays as further described herein. The human THAP-2 gene is localized at chromosomes 12 and 3. The THAP-2 protein comprises a THAP domain at amino acids 1 to 89. Analysis of expressed sequences (accession numbers indicated, which may be specifically included or excluded from the nucleic acids of the invention) in databases suggests that THAP-2 is expressed as follows: BG677995 (squamous cell carcinoma); AV718199 (hypothalamus); BI600215 (hypothalamus); A1208780 (Soares_testis_NHT); BE566995 (carcinoma cell line); A1660418 (thymus pooled)

[0835] THAP-3

[0836] The human THAP-3 cDNA which is approximately 1995 nucleotides in length shown in SEQ ID NO: 162. The THAP-3 gene encodes a protein which is approximately 239 amino acid residues in length, shown in SEQ ID NO: 5. One aspect of the invention pertains to purified or isolated nucleic acid molecules that encode THAP-3 proteins or biologically active portions thereof as further described herein, as well as nucleic acid fragments thereof. Said nucleic acids may be used for example in therapeutic methods and drug screening assays as further described herein. The human THAP-3 gene is localized at chromosome 1. The THAP-3 protein comprises a THAP domain at amino acids 1 to 89. Analysis of expressed sequences (accession numbers indicated, which may be specifically included or excluded from the nucleic acids of the invention) in databases suggests that THAP-3 is expressed as follows: BG700517 (hippocampus); BI460812 (testis); BG707197 (hypothalamus); AW960428 (−); BG437177 (large cell carcinoma); BE962820 (adenocarcinoma); BE548411 (cervical carcinoma cell line); AL522189 (neuroblastoma cells); BE545497 (cervical carcinoma cell line); BE280538 (choriocarcinoma); BI086954 (cervix); BE744363 (adenocarcinoma cell line); and BI549151 (hippocampus).

[0837] THAP-4

[0838] The human THAP-4 cDNA, shown as a sequence having 1999 nucleotides in length shown in SEQ ID NO: 163, encodes a protein which is approximately 577 amino acid residues in length, shown in SEQ ID NO: 6. One aspect of the invention pertains to purified or isolated nucleic acid molecules that encode THAP-4 proteins or biologically active portions thereof as further described herein, as well as nucleic acid fragments thereof. Said nucleic acids may be used for example in therapeutic methods and drug screening assays as further described herein. The THAP-4 protein comprises a THAP domain at amino acids 1 to 90. Analysis of expressed sequences (accession numbers indicated, which may be specifically included or excluded from the nucleic acids of the invention) in databases suggests that THAP-4 is expressed as follows: AL544881 (placenta); BE384014 (melanotic melanoma); AL517205 (neuroblastoma cells); BG394703 (retinoblastoma); BG472327 (retinoblastoma); BI196071 (neuroblastoma); BE255202 (retinoblastoma); BI017349 (lung_tumor); BF972153 (leiomyosarcoma cell line); BG116061 (duodenal adenocarcinoma cell line); AL530558 (neuroblastoma cells); AL520036 (neuroblastoma cells); AL559902 (B cells from Burkitt lymphoma); AL534539 (Fetal brain); BF686560 (leiomyosarcoma cell line); BF345413 (anaplastic oligodendroglioma with 1p/19q loss); BG117228 (adenocarcinoma cell line); BG490646 (large cell carcinoma); and BF769104 (epid_tumor).

[0839] THAP-5

[0840] The human THAP-5 cDNA, shown as a sequence having 1034 nucleotides in length shown in SEQ ID NO: 164, encodes a protein which is approximately 239 amino acid residues in length, shown in SEQ ID NO: 7. One aspect of the invention pertains to purified or isolated nucleic acid molecules that encode THAP-5 proteins or biologically active portions thereof as further described herein, as well as nucleic acid fragments thereof. Said nucleic acids may be used for example in therapeutic methods and drug screening assays as further described herein. The human THAP-5 gene is localized at chromosome 7. The THAP-5 protein comprises a THAP domain at amino acids 1 to 90. Analysis of expressed sequences (accession numbers indicated, which may be specifically included or excluded from the nucleic acids of the invention) in databases suggests that THAP-5 is expressed as follows: BG575430 (mammary adenocarcinoma cell line); BI545812 (hippocampus); BI560073 (testis); BG530461 (embryonal carcinoma); BF244164 (glioblastoma); BI461364 (testis); AW407519 (germinal center B cells); BF103690 (embryonal carcinoma); and BF939577 (kidney).

[0841] THAP-6

[0842] The human THAP-6 cDNA, shown as a sequence having 2291 nucleotides in length shown in SEQ ID NO: 165, encodes a protein which is approximately 222 amino acid residues in length, shown in SEQ ID NO: 8. One aspect of the invention pertains to purified or isolated nucleic acid molecules that encode THAP-6 proteins or biologically active portions thereof as further described herein, as well as nucleic acid fragments thereof. Said nucleic acids may be used for example in therapeutic methods and drug screening assays as further described herein. The human THAP-6 gene is localized at chromosome 4. The THAP-6 protein comprises a THAP domain at amino acids 1 to 90. Analysis of expressed sequences (accession numbers indicated, which may be specifically included or excluded from the nucleic acids of the invention) in databases suggests that THAP-6 is expressed as follows: AV684783 (hepatocellular carcinoma); AV698391 (hepatocellular carcinoma); BI560555 (testis); AV688768 (hepatocellular carcinoma); AV692405 (hepatocellular carcinoma); and AV696360 (hepatocellular carcinoma).

[0843] THAP-7

[0844] The human THAP-7 cDNA, shown as a sequence having 1242 nucleotides in length shown in SEQ ID NO: 166, encodes a protein which is approximately 309 amino acid residues in length, shown in SEQ ID NO: 9. One aspect of the invention pertains to purified or isolated nucleic acid molecules that encode THAP-7 proteins or biologically active portions thereof as further described herein, as well as nucleic acid fragments thereof. Said nucleic acids may be used for example in therapeutic methods and drug screening assays as further described herein. The human THAP-7 gene is localized at chromosome 22q11.2. The THAP-7 protein comprises a THAP domain at amino acids 1 to 90. Analysis of expressed sequences (accession numbers indicated, which may be specifically included or excluded from the nucleic acids of the invention) in databases suggests that THAP-7 is expressed as follows: B1193682 (epithelioid carcinoma cell line); BE253146 (retinoblastoma); BE622113 (melanotic melanoma); BE740360 (adenocarcinoma cell line); BE513955 (Burkitt lymphoma); AL049117 (testis); BF952983 (nervous_normal); AW975614 (−); BE273270 (renal cell adenocarcinoma); BE738428 (glioblastoma); BE388215 (endometrium adenocarcinoma cell line); BF762401 (colon_est); and BG329264 (retinoblastoma).

[0845] THAP-8

[0846] The human THAP-8 cDNA, shown as a sequence having 1383 nucleotides in length shown in SEQ ID NO: 167, encodes a protein which is approximately 274 amino acid residues in length, shown in SEQ ID NO: 10. One aspect of the invention pertains to purified or isolated nucleic acid molecules that encode THAP-8 proteins or biologically active portions thereof as further described herein, as well as nucleic acid fragments thereof. Said nucleic acids may be used for example in therapeutic methods and drug screening assays as further described herein. The human THAP-8 gene is localized at chromosome 19. The THAP-8 protein comprises a THAP domain at amino acids 1 to 92. Analysis of expressed sequences (accession numbers indicated, which may be specifically included or excluded from the nucleic acids of the invention) in databases suggests that THAP-8 is expressed as follows: BG703645 (hippocampus); BF026346 (melanotic melanoma); BE728495 (melanotic melanoma); BG334298 (melanotic melanoma); and BE390697 (endometrium adenocarcinoma cell line).

[0847] THAP-9

[0848] The human THAP-9 cDNA, shown as a sequence having 693 nucleotides in length shown in SEQ ID NO: 168, encodes a protein which is approximately 231 amino acid residues in length, shown in SEQ ID NO: 11. One aspect of the invention pertains to purified or isolated nucleic acid molecules that encode THAP-9 proteins or biologically active portions thereof as further described herein, as well as nucleic acid fragments thereof. Said nucleic acids may be used for example in therapeutic methods and drug screening assays as further described herein. The THAP-9 protein comprises a THAP domain at amino acids 1 to 92. Analysis of expressed sequences (accession numbers indicated, which may be specifically included or excluded from the nucleic acids of the invention) in databases suggests that THAP-9 is expressed as follows: AA333595 (Embryo 8 weeks).

[0849] THAP10

[0850] The human THAP10 cDNA, shown as a sequence having 771 nucleotides in length shown in SEQ ID NO: 169, encodes a protein which is approximately 257 amino acid residues in length, shown in SEQ ID NO: 12. One aspect of the invention pertains to purified or isolated nucleic acid molecules that encode THAP10 proteins or biologically active portions thereof as further described herein, as well as nucleic acid fragments thereof. Said nucleic acids may be used for example in therapeutic methods and drug screening assays as further described herein. The human THAP10 gene is localized at chromosome 15. The THAP10 protein comprises a THAP domain at amino acids 1 to 90. Analysis of expressed sequences (accession numbers indicated, which may be specifically included or excluded from the nucleic acids of the invention) in databases suggests that THAP10 is expressed as follows: AL526710 (neuroblastoma cells); AV725499 (Hypothalamus); AW966404 (−); AW296810 (lung); and AL557817 (T cells from T cell leukemia).

[0851] THAP11

[0852] The human THAP11 cDNA, shown as a sequence having 942 nucleotides in length shown in SEQ ID NO: 170, encodes a protein which is approximately 314 amino acid residues in length, shown in SEQ ID NO: 13. One aspect of the invention pertains to purified or isolated nucleic acid molecules that encode THAP11 proteins or biologically active portions thereof as further described herein, as well as nucleic acid fragments thereof. Said nucleic acids may be used for example in therapeutic methods and drug screening assays as further described herein. The human THAP11 gene is localized at chromosome 16. The THAP11 protein comprises a THAP domain at amino acids 1 to 90. Analysis of expressed sequences (accession numbers indicated, which may be specifically included or excluded from the nucleic acids of the invention) in databases suggests that THAP11 is expressed as follows: AU142300 (retinoblastoma); BI261822 (lymphoma cell line); BG423102 (renal cell adenocarcinoma); and BG423864 (kidney).

[0853] THAP-0

[0854] The human THAP-0 cDNA, shown as a sequence having 2283 nucleotides in length shown in SEQ ID NO: 171, encodes a protein which is approximately 761 amino acid residues in length, shown in SEQ ID NO: 14. One aspect of the invention pertains to purified or isolated nucleic acid molecules that encode THAP-0 proteins or biologically active portions thereof as further described herein, as well as nucleic acid fragments thereof. Said nucleic acids may be used for example in therapeutic methods and drug screening assays as further described herein. The human THAP-0 gene is localized at chromosome 11. The THAP-0 protein comprises a THAP domain at amino acids 1 to 90. Analysis of expressed sequences (accession numbers indicated, which may be specifically included or excluded from the nucleic acids of the invention) in databases suggests that THAP-0 is expressed as follows: BE713222 (head_neck); BE161184 (head_neck); AL119452 (amygdala); AU129709 (teratocarcinoma); AW965460 (−); AW965460(−); AW958065 (−); and BE886885 (leiomyosarcoma).

[0855] An object of the invention is a purified, isolated, or recombinant nucleic acid comprising the nucleotide sequence of SEQ ID NOs: 161-171, 173-175 or complementary sequences thereto, and fragments thereof. The invention also pertains to a purified or isolated nucleic acid comprising a polynucleotide having at least 95% nucleotide identity with a polynucleotide of SEQ ID NOs: 161-171 or 173-175, advantageously 99% nucleotide identity, preferably 99.5% nucleotide identity and most preferably 99.8% nucleotide identity with a polynucleotide of SEQ ID NOs: 161-171, 173-175 or a sequence complementary thereto or a biologically active fragment thereof. Another object of the invention relates to purified, isolated or recombinant nucleic acids comprising a polynucleotide that hybridizes, under the stringent hybridization conditions defined herein, with a polynucleotide of SEQ ID NOs: 161-171, 173-175 or a sequence complementary thereto or a variant thereof or a biologically active fragment thereof. In further embodiments, nucleic acids of the invention include isolated, purified, or recombinant polynucleotides comprising a contiguous span of at least 12, 15, 18, 20, 25, 30, 35, 40, 50, 60, 70, 80, 90, 100, 150, 200, 500, or 1000 nucleotides of a sequence selected from the group consisting of SEQ ID NOs: 161-171, 173-175 or the complements thereof.

[0856] Also encompassed is a purified, isolated, or recombinant nucleic acid polynucleotide encoding a THAP-2 to THAP11 or THAP-0 polypeptide of the invention, as further described herein.

[0857] In another preferred aspect, the invention pertains to purified or isolated nucleic acid molecules that encode a portion or variant of a THAP-2 to THAP11 or THAP-0 protein, wherein the portion or variant displays a THAP-2 to THAP11 or THAP-0 activity of the invention. Preferably said portion or variant is a portion or variant of a naturally occurring full-length THAP-2 to THAP11 or THAP-0 protein. In one example, the invention provides a polynucleotide comprising, consisting essentially of, or consisting of a contiguous span of at least 12, 15, 18, 20, 25, 30, 35, 40, 50, 60, 70, 80, 90, 100, 150, 200, 500, or 1000 nucleotides, to the extent that the length of said span is consistent with the length of the SEQ ID NO, of a sequence selected from the group consisting of SEQ ID NOs: 161-171, 173-175, wherein said nucleic acid encodes a THAP-2 to THAP11 or THAP-0 portion or variant having a THAP-2 to THAP1 or THAP-0 activity described herein. In other embodiment, the invention relates to a polynucleotide encoding a THAP-2 to THAP11 or THAP-0 portion consisting of 8-20, 20-50, 50-70, 60-100, 100-150, 150-200, 200-250 or 250-350 amino acids, to the extent that the length of said portion is consistent with the length of the SEQ ID NO: of a sequence selected from the group consisting of SEQ ID NOs: 4-14, 17-21, 23-40, 42-56, 58-98, 100-114 or a variant thereof, wherein said THAP-2 to THAP11 or THAP-0 portion displays a THAP-2 to THAP11 or THAP-0 activity described herein.

[0858] A THAP-2 to THAP11 or THAP-0 variant nucleic acid may, for example, encode a biologically active THAP-2 to THAP11 or THAP-0 protein comprising at least 1, 2, 3, 5, 10, 20 or 30 amino acid changes from the respective sequence selected from the group consisting of SEQ ID NO: 4-14, 17-21, 23-40, 42-56, 58-98 and 100-114 or may encode a biologically active THAP-2 to THAP11 or THAP-0 protein comprising at least 1%, 2%, 3%, 5%, 8%, 10% or 15% changes in amino acids from the respective sequence of SEQ ID NOs: 4-14, 17-21, 23-40, 42-56, 58-98 and 100-114.

[0859] The sequences of SEQ ID NOs: 4-14 correspond to the human THAP-2 to THAP11 and THAP-0 DNAs respectively. SEQ ID NOs: 17-21, 23-40, 42-56, 58-98, 100-114 correspond to mouse, rat, pig and other orthologs.

[0860] Also encompassed by the THAP-2 to THAP11 and THAP-0 nucleic acids of the invention are nucleic acid molecules which are complementary to THAP-2 to THAP11 or THAP-0 nucleic acids described herein. Preferably, a complementary nucleic acid is sufficiently complementary to the nucleotide respective sequence shown in SEQ ID NOs: 161-171 and 173-175 such that it can hybridize to said nucleotide sequence shown in SEQ ID NOs: 161-171 and 173-175, thereby forming a stable duplex.

[0861] Another object of the invention is a purified, isolated, or recombinant nucleic acid encoding a THAP-2 to THAP11 or THAP-0 polypeptide comprising, consisting essentially of, or consisting of an amino acid sequence selected from the group consisting of SEQ ID NOs: 4-14, 17-21, 23-40, 42-56, 58-98, 100-114 or fragments thereof, wherein the isolated nucleic acid molecule encodes a THAP domain or a THAP-2 to THAP11 or THAP-0 target binding region. Preferably said target binding region is a protein binding region, preferably a PAR-4 binding region, or preferably said target binding region is a DNA binding region. For example, the purified, isolated or recombinant nucleic acid may comprise a genomic DNA or fragment thereof which encodes a polypeptide having a sequence selected from the group consisting of SEQ ID NOs: 4-14, 17-21, 23-40, 42-56, 58-98, 100-114 or a fragment thereof. The purified, isolated or recombinant nucleic acid may alternatively comprise a cDNA consisting of, consisting essentially of, or comprising a sequence selected from the group consisting of SEQ ID NOs: 4-14, 17-21, 23-40, 42-56, 58-98, 100-114 or fragments thereof, wherein the isolated nucleic acid molecule encodes a THAP domain or a THAP-2 to THAP11 or THAP-0 target binding region. In preferred embodiments, a THAP-2 to THAP11 or THAP-0 nucleic acid encodes a THAP-2 to THAP11 or THAP-0 polypeptide comprising at least two THAP-2 to THAP11 or THAP-0 functional domains, such as for example a THAP domain and a THAP-2 to THAP11 or THAP-0 target binding region.

[0862] Particularly preferred nucleic acids of the invention include isolated, purified, or recombinant THAP-2 to THAP11 or THAP-0 nucleic acids comprising, consisting essentially of, or consisting of a contiguous span of at least 12, 15, 18, 20, 25, 30, 35, 40, 50, 60, 70, 80, 90, 100, 150, 200 or 250 nucleotides of a sequence selected from the group consisting of nucleotide positions coding for the relevant amino acids as given in the SEQ ID NO: 161-171 and 173-175.

[0863] In further preferred embodiments, a THAP-2 to THAP11 or THAP-0 nucleic acid comprises a nucleotide sequence encoding a THAP domain having the consensus amino acid sequence of the formula of SEQ ID NOs: 1-2. A THAP-2 to THAP11 or THAP-0 nucleic acid may also encode a THAP domain wherein at least about 95%, 90%, 85%, 50-80%, preferably at least about 60-70%, more preferably at least about 65% of the amino acid residues are identical or similar amino acids-to the THAP consensus domain (SEQ ID NOs: 1-2). The present invention also embodies isolated, purified, and recombinant polynucleotides which encode a polypeptide comprising a contiguous span of at least 6 amino acids, preferably at least 8 or 10 amino acids, more preferably at least 15, 25, 30, 35, 40, 45, 50, 60, 70, 80 or 90 amino acids of SEQ ID NOs: 1-2.

[0864] The nucleotide sequence determined from the cloning of the THAP-2 to THAP11 or THAP-0 genes allows for the generation of probes and primers designed for use in identifying and/or cloning other THAP family members, particularly sequences related to THAP-2 to THAP11 or THAP-0 (e.g. sharing the novel functional domains), as well as THAP-2 to THAP11 or THAP-0 homologues from other species.

[0865] A nucleic acid fragment encoding a biologically active portion of a THAP-2 to THAP11 or THAP-0 protein can be prepared by isolating a portion of a nucleotide sequence selected from the group consisting of SEQ ID NOs: 161-171 and 173-175, which encodes a polypeptide having a THAP-2 to THAP11 or THAP-0 biological activity (the biological activities of the THAP-family proteins described herein), expressing the encoded portion of the THAP-2 to THAP11 or THAP-0 protein (e.g., by recombinant expression in vitro or in vivo) and assessing the activity of the encoded portion of the THAP-2 to THAP11 or THAP-0 protein.

[0866] The invention further encompasses nucleic acid molecules that differ from the THAP-2 to THAP11 or THAP-0 nucleotide sequences of the invention due to degeneracy of the genetic code and encode the same THAP-2 to THAP11 or THAP-0 protein, or fragment thereof, of the invention.

[0867] In addition to the THAP-2 to THAP11 or THAP-0 nucleotide sequences described above, it will be appreciated by those skilled in the art that DNA sequence polymorphisms that lead to changes in the amino acid sequences of the respective THAP-2 to THAP11 or THAP-0 protein may exist within a population (e.g., the human population). Such genetic polymorphism may exist among individuals within a population due to natural allelic variation. Such natural allelic variations can typically result in 1-5% variance in the nucleotide sequence of a particular THAP-2 to THAP11 or THAP-0 gene.

[0868] Nucleic acid molecules corresponding to natural allelic variants and homologues of the THAP-2 to THAP11 or THAP-0 nucleic acids of the invention can be isolated based on their homology to the THAP-2 to THAP11 or THAP-0 nucleic acids disclosed herein using the cDNAs disclosed herein, or a portion thereof, as a hybridization probe according to standard hybridization techniques under stringent hybridization conditions.

[0869] Probes based on the THAP-2 to THAP11 or THAP-0 nucleotide sequences can be used to detect transcripts or genomic sequences encoding the same or homologous proteins. In preferred embodiments, the probe further comprises a label group attached thereto, e.g., the label group can be a radioisotope, a fluorescent compound, an enzyme, or an enzyme co-factor. Such probes can be used as a part of a diagnostic test kit for identifying cells or tissue which misexpress a THAP-2 to THAP11 or THAP-0 protein, such as by measuring a level of a THAP-2 to THAP11 or THAP-0-encoding nucleic acid in a sample of cells from a subject e.g., detecting THAP-2 to THAP11 or THAP-0 mRNA levels or determining whether a genomic THAP-2 to THAP11 or THAP-0 gene has been mutated or deleted.

[0870] THAP-2 to THAP11 and THAP-0 Polypeptides

[0871] The term “THAP-2 to THAP11 or THAP-0 polypeptides” is used herein to embrace all of the proteins and polypeptides of the present invention relating to THAP-2, THAP-3, THAP-4, THAP-5, THAP-6, THAP-7, THAP-8, THAP-9, THAP10, THAP11 and THAP-0. Also forming part of the invention are polypeptides encoded by the polynucleotides of the invention, as well as fusion polypeptides comprising such polypeptides. The invention embodies THAP-2 to THAP11 or THAP-0 proteins from humans, including isolated or purified THAP-2 to THAP11 or THAP-0 proteins consisting of, consisting essentially of, or comprising a sequence selected from the group consisting of SEQ ID NOs: 4-14, 17-21, 23-40, 42-56, 58-98 and 100-114.

[0872] The invention concerns the polypeptide encoded by a nucleotide sequence selected from the group consisting of SEQ ID NOs: 161-171, 172-175 and a complementary sequence thereof and a fragment thereof.

[0873] The present invention embodies isolated, purified, and recombinant polypeptides comprising a contiguous span of at least 6 amino acids, preferably at least 8 to 10 amino acids, more preferably at least 12, 15, 20, 25, 30, 40, 50, 100, 150, 200, 300 or 500 amino acids, to the extent that said span is consistent with the particular SEQ ID NO:, of a sequence selected from the group consisting of SEQ ID NOs: 4-14, 17-21, 23-40, 42-56, 58-98 and 100-114. In other preferred embodiments the contiguous stretch of amino acids comprises the site of a mutation or functional mutation, including a deletion, addition, swap or truncation of the amino acids in the THAP-2 to THAP11 or THAP-0 protein sequence.

[0874] One aspect of the invention pertains to isolated THAP-2 to THAP11 and THAP-0 proteins, and biologically active portions thereof, as well as polypeptide fragments suitable for use as immunogens to raise anti-THAP-2 to THAP11 or THAP-0 antibodies. In one embodiment, native THAP-2 to THAP11 or THAP-0 proteins can be isolated from cells or tissue sources by an appropriate purification scheme using standard protein purification techniques. In another embodiment, THAP-2 to THAP11 or THAP-0 proteins are produced by recombinant DNA techniques. Alternative to recombinant expression, a THAP-2 to THAP11 or THAP-0 protein or polypeptide can be synthesized chemically using standard peptide synthesis techniques.

[0875] Biologically active portions of a THAP-2 to THAP11 or THAP-0 protein include peptides comprising amino acid sequences sufficiently homologous to or derived from the amino acid sequence of the THAP-2 to THAP11 or THAP-0 protein, e.g., an amino acid sequence shown in SEQ ID NOs: 4-14, 17-21, 23-40, 42-56, 58-98 or 100-114, which include less amino acids than the respective full length THAP-2 to THAP11 or THAP-0 protein, and exhibit at least one activity of the THAP-2 to THAP11 or THAP-0 protein. The present invention also embodies isolated, purified, and recombinant portions or fragments of a THAP-2 to THAP11 or THAP-0 polypeptide comprising a contiguous span of at least 6 amino acids, preferably at least 8 to 10 amino acids, more preferably at least 12, 15, 20, 25, 30, 40, 50, 100, 150, 200, 300 or 500 amino acids, to the extent that said span is consistent with the particular SEQ ID NO, of a sequence selected from the group consisting of SEQ ID NOs: 4-14, 17-21, 23-40, 42-56, 58-98 and 100-114. Also encompassed are THAP-2 to THAP11 or THAP-0 polypeptides which comprise between 10 and 20, between 20 and 50, between 30 and 60, between 50 and 100, or between 100 and 200 amino acids of a sequence selected from the group consisting of SEQ ID NOs: 4-14, 17-21, 23-40, 42-56, 58-98 and 100-114. In other preferred embodiments the contiguous stretch of amino acids comprises the site of a mutation or functional mutation, including a deletion, addition, swap or truncation of the amino acids in the THAP-2 to THAP11 or THAP-0 protein sequence.

[0876] A biologically active THAP-2 to THAP11 or THAP-0 protein may, for example, comprise at least 1, 2, 3, 5, 10, 20 or 30 amino acid changes from the sequence of SEQ ID NOs: 4-14, 17-21, 23-40, 42-56, 58-98 or 100-114, or may encode a biologically active THAP-2 to THAP11 or THAP-0 protein comprising at least 1%, 2%, 3%, 5%, 8%, 10% or 15% changes in amino acids from the sequence of SEQ ID NOs: 4-14, 17-21, 23-40, 42-56, 58-98 or 100-114.

[0877] In a preferred embodiment, the THAP-2 protein comprises, consists essentially of, or consists of a THAP-2 THAP domain, preferably having the amino acid sequence of amino acid positions 1 to 89 shown in SEQ ID NO: 4, or fragments or variants thereof. The invention also concerns the polypeptide encoded by the THAP-2 nucleotide sequences of the invention, or a complementary sequence thereof or a fragment thereof. The present invention thus also embodies isolated, purified, and recombinant polypeptides comprising, consisting essentially of or consisting of a contiguous span of at least 6 amino acids, preferably at least 8 to 10 amino acids, more preferably at least 12, 15, 20, 25, 30, 40, 50, 70, 80 or 89 amino acids of a sequence comprising amino acid positions 1 to 89 of SEQ ID NO: 4. In another aspect, a THAP-2 polypeptide may comprise a THAP domain wherein at least about 95%, 90%, 85%, 50-80%, preferably at least about 60-70%, more preferably at least about 65% of the amino acid residues are identical or similar amino acids-to the THAP domain consensus domain (SEQ ID NOs: 1-2). Also encompassed by the present invention are isolated, purified, nucleic acids encoding a THAP-2 polypeptide comprising, consisting essentially of, or consisting of a THAP domain at amino acid positions 1 to 89 shown in SEQ ID NO: 4, or fragments or variants thereof. Preferably, said THAP-2 polypeptide comprises a PAR-4 binding domain and/or a DNA binding domain.

[0878] In a preferred embodiment, the THAP-3 protein comprises, consists essentially of, or consists of a THAP-3 THAP domain, preferably having the amino acid sequence of amino acid positions 1 to 89 shown in SEQ ID NO: 5, or fragments or variants thereof. The invention also concerns the polypeptide encoded by the THAP-3 nucleotide sequences of the invention, or a complementary sequence thereof or a fragment thereof. The present invention thus also embodies isolated, purified, and recombinant polypeptides comprising, consisting essentially of or consisting of a contiguous span of at least 6 amino acids, preferably at least 8 to 10 amino acids, more preferably at least 12, 15, 20, 25, 30, 40, 50, 70, 80 or 89 amino acids of a sequence comprising amino acid positions 1 to 89 of SEQ ID NO: 5. In another aspect, a THAP-3 polypeptide may comprise a THAP domain wherein at least about 95%, 90%, 85%, 50-80%, preferably at least about 60-70%, more preferably at least about 65% of the amino acid residues are identical or similar amino acids-to the THAP domain consensus domain (SEQ ID NOs: 1-2). Also encompassed by the present invention are isolated, purified, nucleic acids encoding a THAP-3 polypeptide comprising, consisting essentially of, or consisting of a THAP domain at amino acid positions 1 to 89 shown in SEQ ID NO: 5, or fragments or variants thereof. Preferably, said THAP-3 polypeptide comprises a PAR-4 binding domain and/or a DNA binding domain.

[0879] In a preferred embodiment, the THAP-4 protein comprises, consists essentially of, or consists of a THAP-4 THAP domain, preferably having the amino acid sequence of amino acid positions 1 to 90 shown in SEQ ID NO: 6, or fragments or variants thereof. The invention also concerns the polypeptide encoded by the THAP-4 nucleotide sequences of the invention, or a complementary sequence thereof or a fragment thereof. The present invention thus also embodies isolated, purified, and recombinant polypeptides comprising, consisting essentially of or consisting of a contiguous span of at least 6 amino acids, preferably at least 8 to 10 amino acids, more preferably at least 12, 15, 20, 25, 30, 40, 50, 70, 80 or 90 amino acids of a sequence comprising amino acid positions 1 to 90 of SEQ ID NO: 6. In another aspect, a THAP-4 polypeptide may comprise a THAP domain wherein at least about 95%, 90%, 85%, 50-80%, preferably at least about 60-70%, more preferably at least about 65% of the amino acid residues are identical or similar amino acids-to the THAP domain consensus domain (SEQ ID NOs: 1-2). Also encompassed by the present invention are isolated, purified, nucleic acids encoding a THAP-4 polypeptide comprising, consisting essentially of, or consisting of a THAP domain at amino acid positions 1 to 90 shown in SEQ ID NO: 6, or fragments or variants thereof.

[0880] In a preferred embodiment, the THAP-5 protein comprises, consists essentially of, or consists of a THAP-5 THAP domain, preferably having the amino acid sequence of amino acid positions 1 to 90 shown in SEQ ID NO: 7, or fragments or variants thereof The invention also concerns the polypeptide encoded by the THAP-5 nucleotide sequences of the invention, or a complementary sequence thereof or a fragment thereof. The present invention thus also embodies isolated, purified, and recombinant polypeptides comprising, consisting essentially of or consisting of a contiguous span of at least 6 amino acids, preferably at least 8 to 10 amino acids, more preferably at least 12, 15, 20, 25, 30, 40, 50, 70, 80 or 90 amino acids of a sequence comprising amino acid positions 1 to 90 of SEQ ID NO: 7. In another aspect, a THAP-5 polypeptide may comprise a THAP domain wherein at least about 95%, 90%, 85%, 50-80%, preferably at least about 60-70%, more preferably at least about 65% of the amino acid residues are identical or similar amino acids-to the THAP domain consensus domain (SEQ ID NOs: 1-2). Also encompassed by the present invention are isolated, purified, nucleic acids encoding a THAP-5 polypeptide comprising, consisting essentially of, or consisting of a THAP domain at amino acid positions 1 to 90 shown in SEQ ID NO: 7, or fragments or variants thereof.

[0881] In a preferred embodiment, the THAP-6 protein comprises, consists essentially of, or consists of a THAP-6 THAP domain, preferably having the amino acid sequence of amino acid positions 1 to 90 shown in SEQ ID NO: 8, or fragments or variants thereof. The invention also concerns the polypeptide encoded by the THAP-6 nucleotide sequences of the invention, or a complementary sequence thereof or a fragment thereof. The present invention thus also embodies isolated, purified, and recombinant polypeptides comprising, consisting essentially of or consisting of a contiguous span of at least 6 amino acids, preferably at least 8 to 10 amino acids, more preferably at least 12, 15, 20, 25, 30, 40, 50, 70, 80 or 90 amino acids of a sequence comprising amino acid positions 1 to 90 of SEQ ID NO: 8. In another aspect, a THAP-6 polypeptide may comprise a THAP domain wherein at least about 95%, 90%, 85%, 50-80%, preferably at least about 60-70%, more preferably at least about 65% of the amino acid residues are identical or similar amino acids-to the THAP domain consensus domain (SEQ ID NOs: 1-2). Also encompassed by the present invention are isolated, purified, nucleic acids encoding a THAP-6 polypeptide comprising, consisting essentially of, or consisting of a THAP domain at amino acid positions 1 to 90 shown in SEQ ID NO: 8, or fragments or variants thereof.

[0882] In a preferred embodiment, the THAP-7 protein comprises, consists essentially of, or consists of a THAP-7 THAP domain, preferably having the amino acid sequence of amino acid positions 1 to 90 shown in SEQ ID NO: 9, or fragments or variants thereof. The invention also concerns the polypeptide encoded by the THAP-7 nucleotide sequences of the invention, or a complementary sequence thereof or a fragment thereof. The present invention thus also embodies isolated, purified, and recombinant polypeptides comprising, consisting essentially of or consisting of a contiguous span of at least 6 amino acids, preferably at least 8 to 10 amino acids, more preferably at least 12, 15, 20, 25, 30, 40, 50, 70, 80 or 90 amino acids of a sequence comprising amino acid positions 1 to 90 of SEQ ID NO: 9. In another aspect, a THAP-7 polypeptide may comprise a THAP domain wherein at least about 95%, 90%, 85%, 50-80%, preferably at least about 60-70%, more preferably at least about 65% of the amino acid residues are identical or similar amino acids-to the THAP domain consensus domain (SEQ ID NOs: 1-2). Also encompassed by the present invention are isolated, purified, nucleic acids encoding a THAP-7 polypeptide comprising, consisting essentially of, or consisting of a THAP domain at amino acid positions 1 to 90 shown in SEQ ID NO: 9, or fragments or variants thereof.

[0883] In a preferred embodiment, the THAP-8 protein comprises, consists essentially of, or consists of a THAP-8 THAP domain, preferably having the amino acid sequence of amino acid positions 1 to 92 shown in SEQ ID NO: 10, or fragments or variants thereof. The invention also concerns the polypeptide encoded by the THAP-8 nucleotide sequences of the invention, or a complementary sequence thereof or a fragment thereof. The present invention thus also embodies isolated, purified, and recombinant polypeptides comprising, consisting essentially of or consisting of a contiguous span of at least 6 amino acids, preferably at least 8 to 10 amino acids, more preferably at least 12, 15, 20, 25, 30, 40, 50, 70, 80 or 90 amino acids of a sequence comprising amino acid positions 1 to 92 of SEQ ID NO: 10. In another aspect, a THAP-8 polypeptide may comprise a THAP domain wherein at least about 95%, 90%, 85%, 50-80%, preferably at least about 60-70%, more preferably at least about 65% of the amino acid residues are identical or similar amino acids-to the THAP domain consensus domain (SEQ ID NOs: 1-2). Also encompassed by the present invention are isolated, purified, nucleic acids encoding a THAP-8 polypeptide comprising, consisting essentially of, or consisting of a THAP domain at amino acid positions 1 to 92 shown in SEQ ID NO: 10, or fragments or variants thereof.

[0884] In a preferred embodiment, the THAP-9 protein comprises, consists essentially of, or consists of a THAP-9 THAP domain, preferably having the amino acid sequence of amino acid positions 1 to 92 shown in SEQ ID NO: 11, or fragments or variants thereof. The invention also concerns the polypeptide encoded by the THAP-9 nucleotide sequences of the invention, or a complementary sequence thereof or a fragment thereof. The present invention thus also embodies isolated, purified, and recombinant polypeptides comprising, consisting essentially of or consisting of a contiguous span of at least 6 amino acids, preferably at least 8 to 10 amino acids, more preferably at least 12, 15, 20, 25, 30, 40, 50, 70, 80 or 90 amino acids of a sequence comprising amino acid positions 1 to 92 of SEQ ID NO: 11. In another aspect, a THAP-9 polypeptide may comprise a THAP domain wherein at least about 95%, 90%, 85%, 50-80%, preferably at least about 60-70%, more preferably at least about 65% of the amino acid residues are identical or similar amino acids-to the THAP domain consensus domain (SEQ ID NOs: 1-2). Also encompassed by the present invention are isolated, purified, nucleic acids encoding a THAP-9 polypeptide comprising, consisting essentially of, or consisting of a THAP domain at amino acid positions 1 to 92 shown in SEQ ID NO: 11, or fragments or variants thereof.

[0885] In a preferred embodiment, the THAP10 protein comprises, consists essentially of, or consists of a THAP10 THAP domain, preferably having the amino acid sequence of amino acid positions 1 to 90 shown in SEQ ID NO: 12, or fragments or variants thereof. The invention also concerns the polypeptide encoded by the THAP10 nucleotide sequences of the invention, or a complementary sequence thereof or a fragment thereof. The present invention thus also embodies isolated, purified, and recombinant polypeptides comprising, consisting essentially of or consisting of a contiguous span of at least 6 amino acids, preferably at least 8 to 10 amino acids, more preferably at least 12, 15, 20, 25, 30, 40, 50, 70, 80 or 90 amino acids of a sequence comprising amino acid positions 1 to 90 of SEQ ID NO: 12. In another aspect, a THAP10 polypeptide may comprise a THAP domain wherein at least about 95%, 90%, 85%, 50-80%, preferably at least about 60-70%, more preferably at least about 65% of the amino acid residues are identical or similar amino acids-to the THAP domain consensus domain (SEQ ID NOs: 1-2). Also encompassed by the present invention are isolated, purified, nucleic acids encoding a THAP10 polypeptide comprising, consisting essentially of, or consisting of a THAP domain at amino acid positions 1 to 90 shown in SEQ ID NO: 12, or fragments or variants thereof.

[0886] In a preferred embodiment, the THAP10 protein comprises, consists essentially of, or consists of a THAP11 THAP domain, preferably having the amino acid sequence of amino acid positions 1 to 90 shown in SEQ ID NO: 13, or fragments or variants thereof. The invention also concerns the polypeptide encoded by the THAP11 nucleotide sequences of the invention, or a complementary sequence thereof or a fragment thereof. The present invention thus also embodies isolated, purified, and recombinant polypeptides comprising, consisting essentially of or consisting of a contiguous span of at least 6 amino acids, preferably at least 8 to 10 amino acids, more preferably at least 12, 15, 20, 25, 30, 40, 50, 70, 80 or 90 amino acids of a sequence comprising amino acid positions 1 to 90 of SEQ ID NO: 13. In another aspect, a THAP11 polypeptide may comprise a THAP domain wherein at least about 95%, 90%, 85%, 50-80%, preferably at least about 60-70%, more preferably at least about 65% of the amino acid residues are identical or similar amino acids-to the THAP domain consensus domain (SEQ ID NOs: 1-2). Also encompassed by the present invention are isolated, purified, nucleic acids encoding a THAP11 polypeptide comprising, consisting essentially of, or consisting of a THAP domain at amino acid positions 1 to 90 shown in SEQ ID NO: 13, or fragments or variants thereof.

[0887] In a preferred embodiment, the THAP-0 protein comprises, consists essentially of, or consists of a THAP-0 THAP domain, preferably having the amino acid sequence of amino acid positions 1 to 90 shown in SEQ ID NO: 14, or fragments or variants thereof. The invention also concerns the polypeptide encoded by the THAP-0 nucleotide sequences of the invention, or a complementary sequence thereof or a fragment thereof. The present invention thus also embodies isolated, purified, and recombinant polypeptides comprising, consisting essentially of or consisting of a contiguous span of at least 6 amino acids, preferably at least 8 to 10 amino acids, more preferably at least 12, 15, 20, 25, 30, 40, 50, 70, 80 or 90 amino acids of a sequence comprising amino acid positions 1 to 90 of SEQ ID NO: 14. In another aspect, a THAP-0 polypeptide may comprise a THAP domain wherein at least about 95%, 90%, 85%, 50-80%, preferably at least about 60-70%, more preferably at least about 65% of the amino acid residues are identical or similar amino acids-to the THAP domain consensus domain (SEQ ID NOs: 1-2). Also encompassed by the present invention are isolated, purified, nucleic acids encoding a THAP-0 polypeptide comprising, consisting essentially of, or consisting of a THAP domain at amino acid positions 1 to 90 shown in SEQ ID NO: 14, or fragments or variants thereof.

[0888] In other embodiments, the THAP-2 to THAP11 or THAP-0 protein is substantially homologous to the sequences of SEQ ID NOs: 4-14, 17-21, 23-40, 42-56, 58-98 or 100-114 and retains the functional activity of the THAP-2 to THAP11 or THAP-0 protein, yet differs in amino acid sequence due to natural allelic variation or mutagenesis, as described further herein. Accordingly, in another embodiment, the THAP-2 to THAP11 or THAP-0 protein is a protein which comprises an amino acid sequence that shares more than about 60% but less than 100% homology with the amino acid sequence of SEQ ID NOs: 4-14, 17-21, 23-40, 42-56, 58-98 or 100-114 and retains the functional activity of the THAP-2 to THAP11 or THAP-0 proteins of SEQ ID NOs: 4-14, 17-21, 23-40, 42-56, 58-98 or 100-114, respectively. Preferably, the protein is at least about 30%, 40%, 50%, 60%, 70%, 80%, 85%, 90%, 92%, 95%, 97%, 98%, 99% or 99.8% homologous to SEQ ID NOs: 4-14, 17-21, 23-40, 42-56, 58-98 or 100-114, but is not identical to SEQ ID NOs: 4-14, 17-21, 23-40, 42-56, 58-98 or 100-114. Preferably the THAP-2 to THAP11 or THAP-0 is less than identical (e.g. 100% identity) to a naturally occurring THAP-2 to THAP11 or THAP-0. Percent homology can be determined as further detailed above.

[0889] Assessing Polypeptides, Methods for Obtaining Variant Nucleic Acids and Polypeptides

[0890] It will be appreciated that by characterizing the function of THAP-family polypeptides, the invention further provides methods of testing the activity of, or obtaining, functional fragments and variants of THAP-family and THAP domain nucleotide sequences involving providing a variant or modified THAP-family or THAP domain nucleic acid and assessing whether a polypeptide encoded thereby displays a THAP-family activity of the invention. Encompassed is thus a method of assessing the function of a THAP-family or THAP domain polypeptide comprising: (a) providing a THAP family or THAP domain polypeptide, or a biologically active fragment or homologue thereof; and (b) testing said THAP family or THAP domain polypeptide, or a biologically active fragment or homologue thereof for a THAP-family activity. Any suitable format may be used, including cell free, cell-based and in vivo formats. For example, said assay may comprise expressing a THAP-family or THAP domain nucleic acid in a host cell, and observing THAP-family activity in said cell. In another example, a THAP family or THAP domain polypeptide, or a biologically active fragment or homologue thereof is introduced to a cell, and a THAP-family activity is observed. THAP-family activity may be any activity as described herein, including. (1) mediating apoptosis or cell proliferation when expressed or introduced into a cell, most preferably inducing or enhancing apoptosis, and/or most preferably reducing cell proliferation; (2) mediating apoptosis or cell proliferation of an endothelial cell; (3) mediating apoptosis or cell proliferation of a hyperproliferative cell; (4) mediating apoptosis or cell proliferation of a CNS cell, preferably a neuronal or glial cell; or (5) an activity determined in an animal selected from the group consisting of mediating, preferably inhibiting angiogenesis, mediating, preferably inhibiting inflammation, inhibition of metastatic potential of cancerous tissue, reduction of tumor burden, increase in sensitivity to chemotherapy or radiotherapy, killing a cancer cell, inhibition of the growth of a cancer cell, or induction of tumor regression.

[0891] In addition to naturally-occurring allelic variants of the THAP-family or THAP domain sequences that may exist in the population, the skilled artisan will appreciate that changes can be introduced by mutation into the nucleotide sequences of SEQ ID NOs: 160-171, thereby leading to changes in the amino acid sequence of the encoded THAP-family or THAP domain proteins, with or without altering the functional ability of the THAP-family or THAP domain proteins.

[0892] Several types of variants are contemplated including 1) one in which one or more of the amino acid residues are substituted with a conserved or non-conserved amino acid residue and such substituted amino acid residue may or may not be one encoded by the genetic code, or 2) one in which one or more of the amino acid residues includes a substituent group, or 3) one in which the mutated THAP-family or THAP domain polypeptide is fused with another compound, such as a compound to increase the half-life of the polypeptide (for example, polyethylene glycol), or 4) one in which the additional amino acids are fused to the mutated THAP-family or THAP domain polypeptide, such as a leader or secretory sequence or a sequence which is employed for purification of the mutated THAP-family or THAP domain polypeptide or a preprotein sequence. Such variants are deemed to be within the scope of those skilled in the art.

[0893] For example, nucleotide substitutions leading to amino acid substitutions can be made in the sequences of SEQ ID NOs: 160-175 that do not substantially change the biological activity of the protein. An amino acid residue-can be altered from the wild-type sequence encoding a THAP family or THAP domain polypeptide, or a biologically active fragment or homologue thereof without altering the biological activity. In general, amino acid residues that are conserved among the THAP-family of THAP domain-containing proteins of the present invention are predicted to be less amenable to alteration. Furthermore, additional conserved amino acid residues may be amino acids that are conserved between the THAP-family proteins of the present invention.

[0894] In one aspect, the invention pertains to nucleic acid molecules encoding THAP family or THAP domain polypeptides, or biologically active fragments or homologues thereof that contain changes in amino acid residues that are not essential for activity. Such THAP-family proteins differ in amino acid sequence from SEQ ID NOs: 1-114 yet retain biological activity. In one embodiment, the isolated nucleic acid molecule comprises a nucleotide sequence encoding a protein, wherein the protein comprises an amino acid sequence at least about 60% homologous to an amino acid sequence selected from the group consisting of SEQ ID NOs: 1-114. Preferably, the protein encoded by the nucleic acid molecule is at least about 65-70% homologous to an amino acid sequence selected from the group consisting of SEQ ID NOs: 1-114, more preferably sharing at least about 75-80% identity with an amino acid sequence selected from the group consisting of SEQ ID NOs: 1-114, even more preferably sharing at least about 85%, 90%, 92%, 95%, 97%, 98%, 99% or 99.8% identity with an amino acid sequence selected from the group consisting of SEQ ID NOs: 1-114.

[0895] In another aspect, the invention pertains to nucleic acid molecules encoding THAP-family proteins that contain changes in amino acid residues that result in increased biological activity, or a modified biological activity. In another aspect, the invention pertains to nucleic acid molecules encoding THAP-family proteins that contain changes in amino acid residues that are essential for a THAP-family activity. Such THAP-family proteins differ in amino acid sequence from SEQ ID NOs: 1-114 and display reduced or essentially lack one or more THAP-family biological activities. The invention also encompasses a THAP family or THAP domain polypeptide, or a biologically active fragment or homologue thereof which may be useful as dominant negative mutant of a THAP family or THAP domain polypeptide.

[0896] An isolated nucleic acid molecule encoding a THAP family or THAP domain polypeptide, or a biologically active fragment or homologue thereof homologous to a protein of any one of SEQ ID NOs: 1-114 can be created by introducing one or more nucleotide substitutions, additions or deletions into the nucleotide sequence of SEQ ID NOs: 1-114 such that one or more amino acid substitutions, additions or deletions are introduced into the encoded protein. Mutations can be introduced into any of SEQ ID NOs: 1-114, by standard techniques, such as site-directed mutagenesis and PCR-mediated mutagenesis. For example, conservative amino acid substitutions may be made at one or more predicted non-essential amino acid residues. A “conservative amino acid substitution” is one in which the amino acid residue is replaced with an amino acid residue having a similar side chain. Families of amino acid residues having similar side chains have been defined in the art. These families include amino acids with basic side chains (e.g., lysine, arginine, histidine), acidic side chains (e.g., aspartic acid, glutamic acid), uncharged polar side chains (e.g., glycine, asparagine, glutamine, serine, threonine, tyrosine, cysteine), nonpolar side chains (e.g., alanine, valine, leucine, isoleucine, proline, phenylalanine, methionine, tryptophan), beta-branched side chains (e.g., threonine, valine, isoleucine) and aromatic side chains (e.g., tyrosine, phenylalanine, tryptophan, histidine). Thus, a predicted nonessential amino acid residue in a THAP family or THAP domain polypeptide, or a biologically active fragment or homologue thereof may be replaced with another amino acid residue from the same side chain family. Alternatively, in another embodiment, mutations can be introduced randomly along all or part of a THAP-family or THAP domain coding sequence, such as by saturation mutagenesis, and the resultant mutants can be screened for THAP-family biological activity to identify mutants that retain activity. Following mutagenesis of one of SEQ ID NOs: 1-114, the encoded protein can be expressed recombinantly and the activity of the protein can be determined.

[0897] In a preferred embodiment, a mutant THAP family or THAP domain polypeptide, or a biologically active fragment or homologue thereof encoded by a THAP family or THAP domain polypeptide, or a biologically active fragment or homologue thereof of THAP domain nucleic acid of the invention can be assayed for a THAP-family activity in any suitable assay, examples of which are provided herein.

[0898] The invention also provides THAP-family or THAP domain chimeric or fusion proteins. As used herein, a THAP-family or THAP domain “chimeric protein” or “fusion protein” comprises a THAP-family or THAP domain polypeptide of the invention operatively linked, preferably fused in frame, to a non-THAP-family or non-THAP domain polypeptide. In a preferred embodiment, a THAP-family or THAP domain fusion protein comprises at least one biologically active portion of a THAP-family or THAP domain protein. In another preferred embodiment, a THAP-family fusion protein comprises at least two biologically active portions of a THAP-family protein. For example, in one embodiment, the fusion protein is a GST-THAP-family fusion protein in which the THAP-family sequences are fused to the C-terminus of the GST sequences. Such fusion proteins can facilitate the purification of recombinant THAP-family polypeptides. In another embodiment, the fusion protein is a THAP-family protein containing a heterologous signal sequence at its N-terminus, such as for example to allow for a desired cellular localization in a certain host cell.

[0899] The THAP-family or THAP domain fusion proteins of the invention can be incorporated into pharmaceutical compositions and administered to a subject in vivo. Moreover, the THAP-family-fusion or THAP domain proteins of the invention can be used as immunogens to produce anti-THAP-family or anti or THAP domain antibodies in a subject, to purify THAP-family or THAP domain ligands and in screening assays to identify molecules which inhibit the interaction of THAP-family or THAP domain with a THAP-family or THAP domain target molecule.

[0900] Furthermore, isolated peptidyl portions of the subject THAP-family or THAP domain proteins can also be obtained by screening peptides recombinantly produced from the corresponding fragment of the nucleic acid encoding such peptides. In addition, fragments can be chemically synthesized using techniques known in the art such as conventional Merrifield solid phase f-Moc or t-Boc chemistry. For example, a THAP-family or THAP domain protein of the present invention may be arbitrarily divided into fragments of desired length with no overlap of the fragments, or preferably divided into overlapping fragments of a desired length. The fragments can be produced (recombinantly or by chemical synthesis) and tested to identify those peptidyl fragments which can function as either agonists or antagonists of a THAP-family protein activity, such as by microinjection assays or in vitro protein binding assays. In an illustrative embodiment, peptidyl portions of a THAP-family protein, such as a THAP domain or a THAP-family target binding region (e.g. PAR4 in the case of THAP1, THAP-2 and THAP-3), can be tested for THAP-family activity by expression as thioredoxin fusion proteins, each of which contains a discrete fragment of the THAP-family protein (see, for example, U.S. Pat. Nos. 5,270,181 and 5,292,646; and PCT publication WO94/02502, the disclosures of which are incorporated herein by reference).

[0901] The present invention also pertains to variants of the THAP-family or THAP domain proteins which function as either THAP-family or THAP domain mimetics or as THAP-family or THAP domain inhibitors. Variants of the THAP-family or THAP domain proteins can be generated by mutagenesis, e.g., discrete point mutation or truncation of a THAP-family or THAP domain protein. An agonist of a THAP-family or THAP domain protein can retain substantially the same, or a subset, of the biological activities of the naturally occurring form of a THAP-family or THAP domain protein. An antagonist of a THAP-family or THAP domain protein can inhibit one or more of the activities of the naturally occurring form of the THAP-family or THAP domain protein by, for example, competitively inhibiting the association of a THAP-family or THAP domain protein with a THAP-family target molecule. Thus, specific biological effects can be elicited by treatment with a variant of limited function. In one embodiment, variants of a THAP-family or THAP domain protein which function as either THAP-family or THAP domain agonists (mimetics) or as THAP-family or THAP domain antagonists can be identified by screening combinatorial libraries of mutants, e.g., truncation mutants, of a THAP-family or THAP domain protein for THAP-family or THAP domain protein agonist or antagonist activity. In one embodiment, a variegated library of THAP-family variants is generated by combinatorial mutagenesis at the nucleic acid level and is encoded by a variegated gene library. A variegated library of THAP-family variants can be produced by, for example, enzymatically ligating a mixture of synthetic oligonucleotides into gene sequences such that a degenerate set of potential THAP-family sequences is expressible as individual polypeptides, or alternatively, as a set of larger fusion proteins (e.g., for phage display) containing the set of THAP-family sequences therein. There are a variety of methods which can be used to produce libraries of potential THAP-family variants from a degenerate oligonucleotide sequence. Chemical synthesis of a degenerate gene sequence can be performed in an automatic DNA synthesizer, and the synthetic gene then ligated into an appropriate expression vector. Use of a degenerate set of genes allows for the provision, in one mixture, of all of the sequences encoding the desired set of potential THAP-family sequences.

[0902] In addition, libraries of fragments of a THAP-family or THAP domain protein coding sequence can be used to generate a variegated population of THAP-family or THAP domain fragments for screening and subsequent selection of variants of a THAP-family or THAP domain protein. In one embodiment, a library of coding sequence fragments can be generated by treating a double stranded PCR fragment of a THAP-family coding sequence with a nuclease under conditions wherein nicking occurs only about once per molecule, denaturing the double stranded DNA, renaturing the DNA to form double stranded DNA which can include sense/antisense pairs from different nicked products, removing single stranded portions from reformed duplexes by treatment with S1 nuclease, and ligating the resulting fragment library into an expression vector. By this method, an expression library can be derived which encodes N-terminal, C-terminal and internal fragments of various sizes of the THAP-family protein.

[0903] Modified THAP-family or THAP domain proteins can be used for such purposes as enhancing therapeutic or prophylactic efficacy, or stability (e.g., ex vivo shelf life and resistance to proteolytic degradation in vivo). Such modified peptides, when designed to retain at least one activity of the naturally occurring form of the protein, are considered functional equivalents of the THAP-family or THAP domain protein described in more detail herein. Such modified peptide can be produced, for instance, by amino acid substitution, deletion, or addition.

[0904] Whether a change in the amino acid sequence of a peptide results in a functional THAP-family or THAP domain homolog (e.g. functional in the sense that it acts to mimic or antagonize the wild-type form) can be readily determined by assessing the ability of the variant peptide to produce a response in cells in a fashion similar to the wild-type THAP-family or THAP domain protein or competitively inhibit such a response. Peptides in which more than one replacement has taken place can readily be tested in the same manner.

[0905] This invention further contemplates a method of generating sets of combinatorial mutants of the presently disclosed THAP-family or THAP domain proteins, as well as truncation and fragmentation mutants, and is especially useful for identifying potential variant sequences which are functional in binding to a THAP-family- or THAP domain-target protein but differ from a wild-type form of the protein by, for example, efficacy, potency and/or intracellular half-life. One purpose for screening such combinatorial libraries is, for example, to isolate novel THAP-family or THAP domain homologs which function as either an agonist or an antagonist of the biological activities of the wild-type protein, or alternatively, possess novel activities all together. For example, mutagenesis can give rise to THAP-family homologs which have intracellular half-lives dramatically different than the corresponding wild-type protein. The altered protein can be rendered either more stable or less stable to proteolytic degradation or other cellular process which result in destruction of, or otherwise inactivation of, a THAP-family protein. Such THAP-family homologs, and the genes which encode them, can be utilized to alter the envelope of expression for a particular recombinant THAP-family protein by modulating the half-life of the recombinant protein. For instance, a short half-life can give rise to more transient biological effects associated with a particular recombinant THAP-family protein and, when part of an inducible expression system, can allow tighter control of recombinant protein levels within a cell. As above, such proteins, and particularly their recombinant nucleic acid constructs, can be used in gene therapy protocols.

[0906] In an illustrative embodiment of this method, the amino acid sequences for a population of THAP-family homologs or other related proteins are aligned, preferably to promote the highest homology possible. Such a population of variants can include, for example. THAP-family homologs from one or more species, or THAP-family homologs from the same species but which differ due to mutation. Amino acids which appear at each position of the aligned sequences are selected to create a degenerate set of combinatorial sequences. There are many ways by which the library of potential THAP-family homologs can be generated from a degenerate oligonucleotide sequence. Chemical synthesis of a degenerate gene sequence can be carried out in an automatic DNA synthesizer, and the synthetic genes then be ligated into an appropriate gene for expression. The purpose of a degenerate set of genes is to provide, in one mixture, all of the sequences encoding the desired set of potential THAP-family sequences. The synthesis of degenerate oligonucleotides is well known in the art (see for example. Narang, SA (1983) Tetrahedron 393; Itakura et al. (1981) Recombinant DNA, Proc 3rd Cleveland Sympos. Macromolecules, ed. A G Walton, Amsterdam: Elsevier pp. 273-289; Itakura et al. (1984) Annu. Rev. Biochem. 53:323; Itakura et al. (1984) Science 198:1056; Ike et al. (1983) Nucleic Acid Res. 11:477. Such techniques have been employed in the directed evolution of other proteins (see, for example, Scott et al. (1990) Science 249:386-390; Roberts et al. (1992) PNAS 89:2429-2433; Devlin et al. (1990) Science 249: 404-406; Cwirla et al. (1990) PNAS 87: 6378-6382; as well as U.S. Pat. Nos. 5,223,409, 5,198,346, and 5,096,815). The disclosures of the above references are incorporated herein by reference in their entireties.

[0907] Alternatively, other forms of mutagenesis can be utilized to generate a combinatorial library, particularly where no other naturally occurring homologs have yet been sequenced. For example, THAP-family homologs (both agonist and antagonist forms) can be generated and isolated from a library by screening using, for example, alanine scanning mutagenesis and the like (Ruf et al. (1994) Biochemistry 33:1565-1572; Wang et al. (1994) J Biol. Chem. 269:3095-3099; Balint et al. (1993) Gene 137:109-118; Grodberg et al. (1993) Eur. J Biochem. 218:597-601; Nagashima et al. (1993) J Biol. Chem. 268:2888-2892; Lowman et al. (1991) Biochemistry 30:10832-10838; and Cunningham et al. (1989) Science 244:1081-1085), by linker scanning mutagenesis (Gustin et al. (1993) Virology 193:653-660; Brown et al. (1992) Mol. Cell Biol. 12:2644 2652; McKnight et al. (1982) Science 232:316); by saturation mutagenesis (Meyers et al. (1986) Science 232:613); by PCR mutagenesis (Leung et al. (1989) Method Cell Mol Biol 1: 1-19); or by random mutagenesis (Miller et al. (1992) A Short Course in Bacterial Genetics, CSHL Press, Cold Spring Harbor, N.Y.; and Greener et al. (1994) Strategies in Mol Biol 7:32-34, the disclosures of which are incorporated herein by reference in their entireties).

[0908] A wide range of techniques are known in the art for screening gene products of combinatorial libraries made by point mutations, as well as for screening cDNA libraries for gene products having a certain property. Such techniques will be generally adaptable for rapid screening of the gene libraries generated by the combinatorial mutagenesis of THAP-family proteins. The most widely used techniques for screening large gene libraries typically comprises cloning the gene library into replicable expression vectors, transforming appropriate cells with the resulting library of vectors, and expressing the combinatorial genes under conditions in which detection of a desired activity facilitates relatively easy isolation of the vector encoding the gene whose product was detected.

[0909] Each of the illustrative assays described below are amenable to high through-put analysis as necessary to screen large numbers of degenerate THAP-family or THAP domain sequences created by combinatorial mutagenesis techniques. In one screening assay, the candidate gene products are displayed on the surface of a cell or viral particle, and the ability of particular cells or viral particles to bind a THAP-family target molecule (protein or DNA) via this gene product is detected in a “panning assay”. For instance, the gene library can be cloned into the gene for a surface membrane protein of a bacterial cell, and the resulting fusion protein detected by panning (Ladner et al., WO 88/06630; Fuchs et al. (1991) BiolTechnology 9:1370-1371, and Goward et al. (1992) TIBS 18:136 140). In a similar fashion, fluorescently labeled THAP-family target can be used to score for potentially functional THAP-family homologs. Cells can be visually inspected and separated under a fluorescence microscope, or, where the morphology of the cell permits, separated by a fluorescence activated cell sorter.

[0910] In an alternate embodiment, the gene library is expressed as a fusion protein on the surface of a viral particle. For instance, in the filamentous phage system, foreign peptide sequences can be expressed on the surface of infectious phage, thereby conferring two significant benefits. First, since these phage can be applied to affinity matrices at very high concentrations, a large number of phage can be screened at one time. Second, since each infectious phage displays the combinatorial gene product on its surface, if a particular phage is recovered from an affinity matrix in low yield, the phage can be amplified by another round of infection. The group of almost identical E. coli filamentous phages M13, fd, and fl are most often used in phage display libraries, as either of the phage gI11 or gVIII coat proteins can be used to generate fusion proteins without disrupting the ultimate packaging of the viral particle (Ladner et al. PCT publication WO 90/02909; Garrard et al., PCT publication WO 92/09690; Marks et al. (1992) J Biol. Chem. 267:16007-16010; Griffiths et al. (1993) EMBO J 12:725-734; Clackson et al. (1991) Nature 352:624-628; and Barbas et al. (1992) PNAS 89:4457 4461, the disclosures of which are incorporated herein by reference in their entireties). In an illustrative embodiment, the recombinant phage antibody system (RPAS, Pharmacia Catalog number 27-9400-01) can be easily modified for use in expressing THAP-family combinatorial libraries, and the THAP-family phage library can be panned on immobilized THAP family target molecule (glutathione immobilized THAP-family target-GST fusion proteins or immobilized DNA). Successive rounds of phage amplification and panning can greatly enrich for THAP-family homologs which retain an ability to bind a THAP-family target and which can subsequently be screened further for biological activities in automated assays, in order to distinguish between agonists and antagonists.

[0911] The invention also provides for identification and reduction to functional minimal size of the THAP-family domains, particularly a THAP domain of the subject THAP-family to generate mimetics, e.g. peptide or non-peptide agents, which are able to disrupt binding of a polypeptide of the present invention with a THAP-family target molecule (protein or DNA). Thus, such mutagenic techniques as described above are also useful to map the determinants of THAP-family proteins which participate in protein-protein or protein-DNA interactions involved in, for example, binding to a THAP-family or THAP domain target protein or DNA. To illustrate, the critical residues of a THAP-family protein which are involved in molecular recognition of the THAP-family target can be determined and used to generate THAP-family target-13P-derived peptidomimetics that competitively inhibit binding of the THAP-family protein to the THAP-family target. By employing, for example, scanning mutagenesis to map the amino acid residues of a particular THAP-family protein involved in binding a THAP-family target, peptidomimetic compounds can be generated which mimic those residues in binding to a THAP-family target, and which, by inhibiting binding of the THAP-family protein to the THAP-family target molecule, can interfere with the function of a THAP-family protein in transcriptional regulation of one or more genes. For instance, non hydrolyzable peptide analogs of such residues can be generated using retro-inverse peptides (e.g., see U.S. Pat. Nos. 5,116,947 and 5,219,089; and Pallai et al. (1983) Int J Pept Protein Res 21:84-92), benzodiazepine (e.g., see Freidinger et al. in Peptides: Chemistry and Biology, G. R. Marshall ed., ESCOM Publisher: Leiden, Netherlands, 1988), azepine (e.g., see Huffman et al. in Peptides.- Chemistry and Biology, G. R. Marshall ed., ESCOM Publisher: Leiden, Netherlands, 1988), substituted gamma lactam rings (Garvey et al. in Peptides: Chemistry and Biology, G. R. Marshall ed., ESCOM Publisher: Leiden, Netherlands, 1988), keto-methylene pseudopeptides (Ewenson et al. (1986) J Med Chem 29:295; and Ewenson et al. in Peptides: Structure and Function (Proceedings of the 9th American Peptide Symposium) Pierce Chemical Co. Rockland, Ill., 1985), P-turn dipeptide cores (Nagai et al. (1985) Tetrahedron Left 26:647; and Sato et al. (1986) J Chem Soc Perkin Trans 1: 123 1), and P-aminoalcohols (Gordon et al. (1985) Biochem Biophys Res Commun 126:419; and Dann et al. (1986) Biochem Biophys Res Commun 134:71, the disclosures of which are incorporated herein by reference in their entireties).

[0912] An isolated THAP-family or THAP domain protein, or a portion or fragment thereof, can be used as an immunogen to generate antibodies that bind THAP-family or THAP domain proteins using standard techniques for polyclonal and monoclonal antibody preparation. A full-length THAP-family protein can be used or, alternatively, the invention provides antigenic peptide fragments of THAP-family or THAP domain proteins for use as immunogens. Any fragment of the THAP-family or THAP domain protein which contains at least one antigenic determinant may be used to generate antibodies. The antigenic peptide of a THAP-family or THAP domain protein comprises at least 8 amino acid residues of an amino acid sequence selected from the group consisting of SEQ ID NOs: 1-114 and encompasses an epitope of a THAP-family or THAP domain protein such that an antibody raised against the peptide forms a specific immune complex with a THAP-family or THAP domain protein. Preferably, the antigenic peptide comprises at least 10 amino acid residues, more preferably at least 15 amino acid residues, even more preferably at least 20 amino acid residues, and most preferably at least 30 amino acid residues.

[0913] Preferred epitopes encompassed by the antigenic peptide are regions of a THAP-family or THAP domain protein that are located on the surface of the protein, e.g., hydrophilic regions.

[0914] A THAP-family or THAP domain protein immunogen typically is used to prepare antibodies by immunizing a suitable subject, (e.g., rabbit, goat, mouse or other mammal) with the immunogen. An appropriate immunogenic preparation can contain, for example, recombinantly expressed THAP-family or THAP domain protein or a chemically synthesized THAP-family or THAP domain polypeptide. The preparation can further include an adjuvant, such as Freund's complete or incomplete adjuvant, or similar immunostimulatory agent. Immunization of a suitable subject with an immunogenic THAP-family or THAP domain protein preparation induces a polyclonal anti-THAP-family or THAP domain protein antibody response.

[0915] The invention concerns antibody compositions, either polyclonal or monoclonal, capable of selectively binding, or selectively bind to an epitope-containing a polypeptide comprising a contiguous span of at least 6 amino acids, preferably at least 8 to 10 amino acids, more preferably at least 12, 15, 20, 25, 30, 40, 50, 100, or more than 100 amino acids of an amino acid sequence selected from the group consisting of amino acid positions 1 to approximately 90 of SEQ ID NOs: 1-114. The invention also concerns a purified or isolated antibody capable of specifically binding to a mutated THAP-family or THAP domain protein or to a fragment or variant thereof comprising an epitope of the mutated THAP-family or THAP domain protein.

[0916] Oligomeric Forms of THAP1

[0917] Certain embodiments of the present invention encompass THAP1 polypeptides in the form of oligomers, such as dimers, trimers, or higher oligomers. Oligomers may be formed by disulfide bonds between cysteine residues on different THAP1 polypeptides, for example. In other embodiments, oligomers comprise from two to four THAP1 polypeptides joined by covalent or non-covalent interactions between peptide moieties fused to the THAP1 polypeptides. Such peptide moieties may be peptide linkers (spacers), or peptides that have the property of promoting oligomerization. Leucine zippers and certain polypeptides derived from antibodies are among the peptides that can promote oligomerization of THAP1 polypeptides attached thereto. DNA sequences encoding THAP1 oligomers, or fusion proteins that are components of such oligomers, are provided herein.

[0918] In one embodiment of the invention, oligomeric THAP1 may comprise two or more THAP1 polypeptides joined through peptide linkers. Examples include those peptide linkers described in U.S. Pat. No. 5,073,627, the disclosure of which is incorporated herein by reference in its entirety. Fusion proteins comprising multiple THAP1 polypeptides separated by peptide linkers may be produced using conventional recombinant DNA technology.

[0919] Another method for preparing THAP1 oligomers involves use of a leucine zipper. Leucine zipper domains are peptides that promote oligomerization of the proteins in which they are found. Leucine zippers were originally identified in several DNA-binding proteins (Landschulz et al., Science 240:1759, 1988), and have since been found in a variety of different proteins. Among the known leucine zippers are naturally occurring peptides and derivatives thereof that dimerize or trimerize. Examples of leucine zipper domains suitable for producing THAP1 oligomers are those described International Publication WO 94/10308, the disclosure of which is incorporated herein by reference in its entirety. Recombinant fusion proteins comprising a THAP1 polypeptide fused to a peptide that dimerizes or trimerizes in solution are expressed in suitable host cells, and the resulting soluble oligomeric THAP1 is recovered from the culture supernatant.

[0920] In some embodiments of the invention, a THAP1 or a THAP-family member dimer is created by fusing THAP1 or a THAP-family member to an Fc region polypeptide derived from an antibody, in a manner that does not substantially affect the binding of THAP1 or a THAP-family member to a chemokine, such as SLC/CCL21. Preparation of fusion proteins comprising heterologous polypeptides fused to various portions of antibody-derived polypeptides (including Fc region) has been described, e.g., by Ashkenazi et al. (1991) PNAS 88:10535, Byrn et al. (1990) Nature 344:667, and Hollenbaugh and Aruffo “Construction of Immunoglobulin Fusion Proteins”, in Current Protocols in Immunology, Supp. 4, pages 10.19.1-10.19.11, 1992, the disclosures of which are incorporated herein by reference in their entireties. The THAP-family/Fc fusion proteins are allowed to assemble much like antibody molecules, whereupon interchain disulfide bonds form between Fc polypeptides, yielding divalent THAP. Similar fusion proteins of TNF receptors and Fc (see for example Moreland et al. (1997) N. Engl. J. Med. 337(3):141-147; van der Poll et al. (1997) Blood 89(10):3727-3734; and Ammann et al. (1997) J. Clin. Invest. 99(7):1699-1703) have been used successfully for treating rheumatoid arthritis. Soluble derivatives have also been made of cell surface glycoproteins in the immunoglobulin gene superfamily consisting of an extracellular domain of the cell surface glycoprotein fused to an immunoglobulin constant (Fc) region (see e.g., Capon, D. J. et al. (1989) Nature 337:525-531 and Capon U.S. Pat. Nos. 5,116,964 and 5,428,130 [CD4-IgG1 constructs]; Linsley, P. S. et al. (1991) J. Exp. Med. 173:721-730 [a CD28-IgG1 construct and a B7-1-IgG1 construct]; and Linsley, P. S. et al. (1991) J. Exp. Med. 174:561-569 and U.S. Pat. No. 5,434,131 [a CTLA4-IgG1], the disclosures of which are incorporated herein by reference in their entireties). Such fusion proteins have proven useful for modulating receptor-ligand interactions.

[0921] Some embodiments relate to THAP-immunoglobulin fusion proteins and THAP chemokine-binding domain fusions with immunoglobulin molecules or fragments thereof. Such fusions can be produced using standard methods, for example, by creating an expression vector encoding the SLC/CCL21 chemokine-binding protein THAP1 fused to the antibody polypeptide and inserting the vector into a suitable host cell. One suitable Fc polypeptide is the native Fc region polypeptide derived from a human IgG1, which is described in International Publication WO 93/10151, the disclosure of which is incorporated herein by reference in its entirety. Another useful Fc polypeptide is the Fc mutein described in U.S. Pat. No. 5,457,035, the disclosure of which is incorporated herein by reference in its entirety. The amino acid sequence of the mutein is identical to that of the native Fc sequence presented in International Publication WO 93/10151, the disclosure of which is incorporated herein by reference in its entirety, except that amino acid 19 has been changed from Leu to Ala, amino acid 20 has been changed from Leu to Glu, and amino acid 22 has been changed from Gly to Ala. This mutein Fc exhibits reduced affinity for immunoglobulin receptors.

[0922] SLC/chemokine-binding fragments of human THAP1 or THAP-family polypeptides, rather than the full protein, can also be employed in methods of the invention. Fragments may be less immunogenic than the corresponding full-length proteins. The ability of a fragment to bind chemokines, such as SLC, can be determined using a standard assay. Fragments can be prepared by any of a number of conventional methods. For example, a desired DNA sequence can be synthesized chemically or produced by restriction endonuclease digestion of a full length cloned DNA sequence and isolated by electrophoresis on agarose gels. Linkers containing restriction endonuclease cleavage sites can be employed to insert the desired DNA fragment into an expression vector, or the fragment can be digested at naturally-present cleavage sites. The polymerase chain reaction (PCR) can also be employed to isolate a DNA sequence encoding a desired protein fragment. Oligonucleotides that define the termini of the desired fragment are used as 5′ and 3′ primers in the PCR procedure. Additionally, known mutagenesis techniques can be used to insert a stop codon at a desired point, e.g., immediately downstream of the codon for the last amino acid of the desired fragment.

[0923] In other embodiments, a THAP-family polypeptide or a biologically active fragment thereof, for example, an SLC-binding domain of THAP1 may be substituted for the variable portion of an antibody heavy or light chain. If fusion proteins are made with both heavy and light chains of an antibody, it is possible to form a THAP-family polypeptide oligomer with at least two, at least three, at least four, at least five, at least six, at least seven, at least eight, at least nine, or more than nine THAP-family polypeptides.

[0924] In some embodiments of the present invention, THAP-chemokine binding can be provided to decrease the biological availability of a chemokine or otherwise disrupt the activity of chemokine. For example, THAP-family polypeptides, SLC-binding domains of THAP-family polypeptides, THAP oligomers, and SLC-binding domain-THAP1-immunoglobulin fusion proteins of the invention can be used to interact with SLC thereby preventing it from performing its normal biological role. In some embodiments, the entire THAP1 polypeptide (SEQ ID NO: 3) can be used to bind to SLC. In other embodiments, fragments of THAP1, such as the SLC-binding domain of the THAP1 (amino acids 143-213 of SEQ ID NO: 3) can used to bind to SLC. Such fragments can be from at least 8, at least 10, at least 12, at least 15, at least 20, at least 25, at least 30, at least 35, at least 40, at least 45, at least 50, at least 55, at least 60, least 65, at least 70, at least 80, at least 90, at least 100, at least 110, at least 120, at least 130, at least 140, at least 150, at least 160, at least 170, at least 180, at least 190, at least 200, at least 210 or at least 213 consecutive amino acids of SEQ ID NO: 3. In some embodiments, fragments can be from at least 8, at least 10, at least 12, at least 15, at least 20, at least 25, at least 30, at least 35, at least 40, at least 45, at least 50, at least 55, at least 60, at least 65 or at least 70 consecutive amino acids of (amino acids 143-213 of SEQ ID NO: 3). THAP-family polypeptides that may be capable of binding SLC, for example THAP2-11 and THAP0 or biologically active fragments thereof can also be used to bind to SLC so as to decrease its biological availability or otherwise disrupt the activity of this chemokine.

[0925] In some embodiments, a plurality of THAP-family proteins, such as a fusion of two or more THAP1 proteins or fragments thereof which comprise an SLC-binding domain (amino acids 143-213 of SEQ ID NO: 3) can be used to bind SLC. For example, oligomers comprising THAP1 fragments of a size of at least 8, at least 10, at least 12, at least 15, at least 20, at least 25, at least 30, at least 35, at least 40, at least 45, at least 50, at least 55, at least 60, at least 65 or at least 70 consecutive amino acids of SEQ ID NO: 3 (amino acids 143-213) can be generated. Amino acid fragments which make up the THAP oligomer may be of the same or different lengths. In some embodiments, the entire THAP1 protein or biologically active portions thereof may be fused together to form an oligomer capable of binding to SLC. THAP-family polypeptides that may be capable of binding SLC, for example THAP2-11 and THAP0, the THAP-family polypeptides of SEQ ID NOs: 1-114 or biologically active fragments thereof can also be used to create oligomers which bind to SLC so as to decrease its biological availability or otherwise disrupt the activity of this chemokine.

[0926] According to another embodiment of the present invention, THAP-family proteins, such as THAP1 or portion of THAP1 which comprise an SLC binding domain (amino acids 143-213 of SEQ ID NO: 3), may be fused to an immunoglobulin or portion thereof. The portion may be an entire immunoglobulin, such as IgG, IgM, IgA or IgE. Additionally, portions of immunoglobulins, such as an Fc domain of the immunoglobulin, can be fused to a THAP-family polypeptide, such as THAP1, fragments thereof or oligomers thereof . Fragments of THAP1 can be, for example, at least 8, at least 10, at least 12, at least 15, at least 20, at least 25, at least 30, at least 35, at least 40, at least 45, at least 50, at least 55, at least 60, at least 65 or at least 70 consecutive amino acids of SEQ ID NO: 3 (amino acids 143-213). In some embodiments, THAP-family polypeptides that may be capable of binding SLC, for example THAP2-11 and THAP0, the THAP-family polypeptides of SEQ ID NOs: 1-114 or biologically active fragments thereof can also be used to form immunoglobulin fusion that bind to SLC so as to decrease its biological availability or otherwise disrupt the activity of this chemokine.

[0927] Some aspects of the present invention relate to THAP-family polypeptides, chemokine-binding domains of THAP-family polypeptides, THAP oligomers, and chemokine-binding domain-THAP-immunoglobulin fusion proteins such as those described above which bind to chemokines other than SLC. For example, THAP-family polypeptides, chemokine-binding domains of THAP-family polypeptides, THAP oligomers, and chemokine-binding domain-THAP-immunoglobulin fusion proteins can be used to bind to or otherwise interact with chemokines from many families such as C chemokines, CC chemokines, C-X-C chemokines, C-X3-C chemokines, XC chemokines or CCK chemokines. In particular, THAP-family polypeptides, chemokine-binding domains of THAP-family polypeptides, THAP oligomers, and chemokine-binding domain-THAP-immunoglobulin fusion proteins may interact with chemokines such as XCL1, XCL2, CCL1, CCL2, CCL3, CCL3L1, SCYA3L2, CCL4, CCL4L, CCL5, CCL6, CCL7, CCL8, SCYA9, SCYA10, CCL11, SCYA12, CCL13, CCL14, CCL15, CCL16, CCL17, CCL18, CCL19, CCL20, CCL21, CCL22, CCL23, CCL24, CCL25, CCL26, CCL27, CCL28, clone 391, CARP CC-1, CCL1, CK-1, regakine-1, K203, CXCL1, CXCL1P, CXCL2, CXCL3, PF4, PF4V1, CXCL5, CXCL6, PPBP, SPBPBP, IL8, CXCL9, CXCL10, CXCL11, CXCL12, CXCL14, CXCL15, CXCL16, NAP-4, LFCA-1, Scyba, JSC, VHSV-induced protein, CX3CL1 and fCL1.

[0928] In some embodiments of the present invention, THAP-family polypeptides, chemokine-binding domains of THAP-family polypeptides, THAP oligomers, and chemokine-binding domain-THAP-immunoglobulin fusion proteins can bind to a chemokine extracellularly. For example, the THAP1 polypeptide, a biologically active fragment thereof (such as the SLC-binding domain of THAP1 (amino acids 143-213 of SEQ ID NO: 3)), an oligomer thereof, or an immunoglobulin fusion thereof can bind to a chemokine extracellularly. In other examples, chemokine-binding domains of other THAP-family members such as THAP2, THAP3, THAP4, THAP5, THAP6, THAP7, THAP8, THAP9, THAP10, THAP11 or THAP0, biologically active fragments thereof, oligomers thereof, or immunoglobulin fusions thereof can be used to bind to chemokines extracellularly. Binding of the THAP-family polypeptides, chemokine-binding domains of THAP-family polypeptides, THAP oligomers, and chemokine-binding domain-THAP-immunoglobulin fusion proteins may either decrease or increase the affinity of the chemokine for its extracellular receptor. In cases where binding of the chemokine to its extracellular receptor is inhibited, the normal biological effect of the chemokine can be inhibited. Such inhibition can prevent the occurrence of chemokine-mediated cellular responses, such as the modulation of cell proliferation, the modulation of angiogenesis, the modulation of an inflammation response, the modulation of apoptosis, the modulation of cell differentiation. In some embodiments, inhibition of the binding of a chemokine to its extracellular receptor can result in transcriptional modulation. Alternatively, in cases where binding of the chemokine to its extracellular receptor is activated, the normal biological effect of the chemokine can be enhanced. Such enhancement can increase the occurrence of chemokine-mediated cellular responses, such as the modulation of cell proliferation, the modulation of angiogenesis, the modulation of an inflammation response, the modulation of apoptosis, the modulation of cell differentiation. In some embodiments, enhancement of the binding of a chemokine to its extracellular receptor can result in transcriptional modulation.

[0929] In some embodiments of the present invention, THAP-family polypeptides, chemokine-binding domains of THAP-family polypeptides, THAP oligomers, and chemokine-binding domain-THAP-immunoglobulin fusion proteins can bind to a chemokine intracellularly. In some embodiments, the THAP-family protein acts as a nuclear receptor for the chemokine. For example, the THAP1 polypeptide, a biologically active fragment thereof (such as the SLC-binding domain of THAP1 (amino acids 143-213 of SEQ ID NO: 3)), an oligomer thereof, or an immunoglobulin fusion thereof can bind to a chemokine intracellularly. In other examples, chemokine-binding domains of other THAP-family members such as THAP2, THAP3, THAP4, THAP5, THAP6, THAP7, THAP8, THAP9, THAP10, THAP11 or THAP0, biologically active fragments thereof, oligomers thereof, or immunoglobulin fusions thereof can be used to bind to chemokines intracellularly. Binding of the THAP-family polypeptides, chemokine-binding domains of THAP-family polypeptides, THAP oligomers, and chemokine-binding domain-THAP-immunoglobulin fusion proteins may either decrease or increase the affinity of the chemokine for its intracellular receptor. In other embodiments, the THAP-family polypeptides, chemokine-binding domains of THAP-family polypeptides, THAP oligomers, and chemokine-binding domain-THAP-immunoglobulin fusion proteins are the intracellular receptor for the chemokine. In cases where binding of the chemokine to its intracellular receptor is inhibited, the normal biological effect of the chemokine can be inhibited. Such inhibition can prevent the occurrence of chemokine-mediated cellular responses, such as the modulation of cell proliferation, the modulation of angiogenesis, the modulation of an inflammation response, the modulation of apoptosis, the modulation of cell differentiation. In some embodiments, inhibition of the binding of a chemokine to its intracellular receptor can result in transcriptional modulation. Alternatively, in cases where binding of the chemokine to its intracellular receptor is activated, the normal biological effect of the chemokine can be enhanced. Such enhancement can increase the occurrence of chemokine-mediated cellular responses, such as the modulation of cell proliferation, the modulation of angiogenesis, the modulation of an inflammation response, the modulation of apoptosis, the modulation of cell differentiation. In some embodiments, enhancement of the binding of a chemokine to its intracellular receptor can result in transcriptional modulation.

[0930] In accordance with another aspect of the invention, THAP-family polypeptides, chemokine-binding domains of THAP-family polypeptides, THAP oligomers, and chemokine-binding domain-THAP-immunoglobulin fusion proteins of the invention can be incorporated into pharmaceutical compositions. Such pharmaceutical compositions can be used to decrease or increase the bioavailability and functionality of a chemokine. For example, THAP-family polypeptides, SLC-binding domains of THAP-family polypeptides, THAP oligomers, and SLC- binding domain-THAP1-immunoglobulin fusion proteins of the present invention can be administered to a subject to inhibit an interaction between SLC and its receptor, such as CCR7, on the surface of cells, to thereby suppress SLC-mediated responses. The inhibition of chemokine SLC may be useful therapeutically for both the treatment of inflammatory or proliferative disorders, as well as modulating (e.g., promoting or inhibiting) cell differentiation, cell proliferation, and/or cell death.

[0931] In an additional embodiment of the present invention, the THAP-family polypeptides, chemokine-binding domains of THAP-family polypeptides, THAP oligomers, and chemokine-binding domain-THAP-immunoglobulin fusion proteins of the present invention can be used to detect the presence of a chemokine in a biological sample and in screening assays to identify molecules which inhibit the interaction of a THAP-family polypeptide with a chemokine. For example, the THAP-family polypeptides, SLC-binding domains of THAP-family polypeptides, THAP oligomers, and SLC-binding domain-THAP1-immunoglobulin fusion proteins of the present invention can be used to detect the presence of SLC in a biological sample and in screening assays to identify molecules which inhibit the interaction of a THAP-family polypeptide with SLC. Such screening assays are similar to those described below for PAR4-THAP interactions.

[0932] Certain aspects of the present invention related to a method of identifying a test compound that modulates THAP-mediated activites. In some cases the THAP-mediated acitivity is SLC-binding. Test compounds which affect THAP-SLC binding can be identified using a screening method wherein a THAP-family polypeptide or a biologically active fragment thereof is contacted with a test compound. In some embodiments, the THAP-family polypeptide comprises an amino acid sequence having at least 30% amino acid identity to an amino acid sequence of SEQ ID NO: I or SEQ ID NO: 2. Whether the test compound modulates the binding of SLC with a THAP-family polypeptide, such as THAP1 (SEQ ID NO: 3), is determined by determining whether the test compound modulates the activity of the THAP-family polypeptide or biologically active fragment thereof. Biologically active framents of a THAP-family polypeptide may be at least 5, at least 8, at least 10, at least 12, at least 15, at least 18, at least 20, at least 25, at least 30, at least 35, at least 40, at least 45, at least 50, at least 60, at least 70, at least 80, at least 90, at least 100, at least 110, at least 120, at least 130, at least 140, at least 150, at least 160, at least 170, at least 180, at least 190, at least 200, at least 210, at least 220 or at least more than 220 amino acids in length. A determination that the test compound modulates the activity of said polypeptide indicates that the test compound is a candidate modulator of THAP-mediated activities.

[0933] Although THAP-family polypeptides, chemokine-binding domains of THAP-family polypeptides, THAP oligomers, and chemokine-binding domain-THAP-immunoglobulin fusion proteins can be used for the above-mentioned chemokine interactions, it will be appreciated that homologs of THAP-family polypeptides, chemokine-binding domains of THAP-family polypeptides, THAP oligomers, and chemokine-binding domain-THAP-immunoglobulin fusion proteins can be used in place of THAP-family polypeptides, chemokine-binding domains of THAP-family polypeptides, THAP oligomers, and chemokine-binding domain-THAP-immunoglobulin fusion proteins. For example, homologs having at least about 30-40% identity, preferably at least about 40-50% identity, more preferably at least about 50-60%, and even more preferably at least about 60-70%, 70-80%, 80%, 90%, 95%, 97%, 98%, 99% or 99.8% identity across the amino acid sequences of SEQ ID NOs: 1-114 or portions thereof can be used.

[0934] Although this section, entitled “Oligomeric Forms of THAP-1,” primarily describes THAP-family polypeptides, SLC-binding domains of THAP-family polypeptides, THAP oligomers, SLC-binding domain-THAP-immunoglobulin fusion proteins and homologs of these polypeptides as well as methods of using such polypeptides, it will be appreciated that such polypeptides are included in the class of THAP-type chemokine-binding agents. Accordingly, the above description also applies to THAP-type chemokine-binding agents. It will be appreciated that THAP-type chemokine-binding agents will be used for applications which include, but are not limited to, chemokine binding, inhibiting or enhancing chemokine activity, chemokine detection, reducing the symptoms associated with a chemokine influenced or mediated condition, and reducing or preventing inflammation or other chemokine mediated conditions. THAP-type chemokine-binding agents can also be used in the kits, devices, compositions, and procedures described elsewhere herein.

[0935] In some embodiments of the present invention, THAP-type chemokine-binding agents bind to or otherwise modulate the activity of one or more chemokines selected from the group consisting of XCL1, XCL2, CCL1, CCL2, CCL3, CCL3L1, SCYA3L2, CCL4, CCL4L, CCL5, CCL6, CCL7, CCL8, SCYA9, SCYA10, CCL11, SCYA12, CCL13, CCL14, CCL15, CCL16, CCL17, CCL18, CCL19, CCL20, CCL21, CCL22, CCL23, CCL24, CCL25, CCL26, CCL27, CCL28, clone 391, CARP CC-1, CCL1, CK-1, regakine-1, K203, CXCL1, CXCL1P, CXCL2, CXCL3, PF4, PF4V1, CXCL5, CXCL6, PPBP, SPBPBP, IL8, CXCL9, CXCL10, CXCL11, CXCL12, CXCL14, CXCL15, CXCL16, NAP-4, LFCA-1, Scyba, JSC, VHSV-induced protein, CX3CL1, and fCL1.

[0936] Chemokine Binding Domains

[0937] In some embodiments of the present invention a chemokine-binding domain that consists essentially of the chemokine binding portion of a THAP-family polypeptide is contemplated. In some embodiments, the THAP-family polypeptide is THAP-1 (SEQ ID NO: 3) or a homolog thereof. Chemokines that are capable of binding to any particular THAP-family member can be determined as described in Examples 16, 32 and 33, which set out both in vitro and in vivo assays for determining the binding affinity of several different chemokines to THAP-1. The portion of the THAP-family protein that binds to the chemokine can readily be determined through the analysis of deletion and point mutants of any of the THAP-family members capable of chemokine-binding. Such analyses of deletion and point mutants were used to determine the specific region of THAP-1 that permits SLC-binding (see Example 15). Additionally, deletion and point mutation studies were used to determine portions of THAP-family proteins as well as specific amino acid residues that interact with PAR-4 (Examples 4-7 and 13). It will be appreciated that the methods described in these Examples can be used to precisely identify the chemokine-binding portion of any THAP-family member using any chemokine.

[0938] By “chemokine-binding domain” or “portion that binds to a chemokine” is meant a fragment which comprises 10, 11, 12, 13, 14, 15, 16, 17, 18, 19, 20, 21, 22, 23, 24, 25, 26, 27, 28, 29, 30, 31, 32, 33, 34, 35, 36, 37, 38, 39, 40, 41, 42, 43, 44, 45, 46, 47, 48, 49, 50, 51, 52, 53, 54, 55, 56, 57, 58, 59, 60, 61, 62, 63, 64, 65, 66, 67, 68, 69, 70, 71, 72, 73, 74, 75, 76, 77, 78, 79, 80, 81, 82, 83, 84, 85, 86, 87, 88, 89, 90, 91, 92, 93, 94, 95, 96, 97, 98, 99, 100, 101, 102, 103, 104, 105, 106, 107, 108, 109, 110, 111, 112, 113, 114, 115, 116, 117, 118, 119, 120, 121, 122, 123, 124, 125, 126, 127, 128, 129, 130, 131, 132, 133, 134, 135, 136, 137, 138, 139, 140, 141, 142, 143, 144, 145, 146, 147, 148, 149, 150, 160, 170, 180, 190, 200, 210 or greater than 210 consecutive amino acids of a THAP-family polypeptide but less than the total number of amino acids present in the THAP-family polypeptide. In some embodiments, the THAP-family polypeptide is THAP-1 (SEQ ID NO: 3).

[0939] The complete amino acid sequence of each human THAP-family polypeptide is described in the Sequence Listing. In particular, THAP-1 is (SEQ ID NO: 3), THAP-2 is (SEQ ID NO: 4), THAP-3 is (SEQ ID NO: 5), THAP-4 is (SEQ ID NO: 6), THAP-5 is (SEQ ID NO: 7), THAP-6 is (SEQ ID NO: 8), THAP-7 is (SEQ ID NO: 9), THAP-8 is (SEQ ID NO: 10), THAP-9 is (SEQ ID NO:11), THAP-10 is (SEQ ID NO: 12), THAP-11 is (SEQ ID NO: 13), THAP-0 is (SEQ ID NO: 14). The complete amino acid sequence of additional THAP-family polypeptides from other species are also listed in the Sequence Listing as SEQ ID NOs: 16-98. As such, the chemokine-binding portion of any of these THAP-family polypeptide sequences that are listed in the Sequence Listing is explicitly described. In particular, in some embodiments, the chemokine-binding domain is a fragment of a THAP-family chemokine-binding agent described by the formula:

[0940] for each THAP-family polypeptide, N=the number of amino acids in the full-length polypeptide; B=a number between 1 and N-1; and E=a number between 1 and N.

[0941] For any THAP-family polypeptide, a chemokine-binding domain is specified by any consecutive sequence of amino acids beginning at an amino acid position B and ending at amino acid position E, wherein E>B.

### Methods of Complex Formation between a Chemokine and a THAP-Type Chemokine-Binding Agent

[0942] Some aspects of the present invention relate to methods for forming a complex between a chemokine and a THAP-type chemokine-binding agent. These methods include the step of contacting one or more chemokines with one or more THAP-type chemokine-binding agents described herein such that a complex comprising one or more chemokines and one or more THAP-type chemokine-binding agents is formed. In some embodiments, a plurality of different chemokines are contacted with one or a plurality of different THAP-type chemokine-binding agents so as to form one or more complexes. Alternatively, a plurality of different THAP-type chemokine-binding agents are contacted with one or more chemokines so as to form one or more complexes.

[0943] A number of different chemokines can be used in the above-described complex formation methods. Such chemokines include, but are not limited to, XCL1, XCL2, CCL1, CCL2, CCL3, CCL3L1, SCYA3L2, CCL4, CCL4L, CCL5, CCL6, CCL7, CCL8, SCYA9, SCYA10, CCL11, SCYA12, CCL13, CCL14, CCL15, CCL16, CCL17, CCL18, CCL19, CCL20, CCL21, CCL22, CCL23, CCL24, CCL25, CCL26, CCL27, CCL28, clone 391, CARP CC-1, CCL1, CK-1, regakine-1, K203, CXCL1, CXCL1P, CXCL2, CXCL3, PF4, PF4V1, CXCL5, CXCL6, PPBP, SPBPBP, IL8, CXCL9, CXCL10, CXCL11, CXCL12, CXCL14, CXCL15, CXCL16, NAP-4, LFCA-1, Scyba, JSC, VHSV-induced protein, CX3CL1 and fCL1.

[0944] Method of forming a complex between a THAP-type chemokine-binding agent and a chemokine can be used both in vitro and in vivo. For example, in vitro uses can include the detection of a chemokine in a solution or a biological sample that has been removed or withdrawn from a subject. Such samples may include, but are not limited to, tissue samples, blood samples, and other fluid or solid samples of biological material. In vivo uses can include, but are not limited to, the detection or localization of chemokines in a subject, reducing or inhibiting the activity of one or more chemokines throughout or in certain areas of a subject's body, and reducing the symptoms associated with a chemokine influenced or mediated condition.

[0945] Modulation of Transcription

[0946] In some embodiments of the present invention THAP-family polypeptides, THAP DNA-binding domains (THAP domains), homologs of THAP-family proteins or homologs of THAP domains are used to modulate transcription. In other embodiments, THAP-family polypeptides, THAP domains, homologs of THAP-family proteins or homologs of THAP domains interact with a chemokine to modulate transcription. In either of the above-mentioned embodiments, a THAP-family polypeptide, THAP domain, THAP-chemokine complex or homologs thereof recognize a THAP responsive element. Recognition of the THAP responsive element by a THAP-family polypeptide, THAP domain, THAP-chemokine complex or homologs thereof results in the modulation of one or more THAP responsive promoters.

[0947] As used herein, “THAP responsive promoter” means, a promoter comprising one or more THAP responsive elements. THAP responsive promoters also include promoters that are indirectly regulated by THAP. For example, a THAP responsive element may be present as an upstream enhancer sequence, the presence of which, activates transcription at the downstream promoter. In another nonlimiting example, a first promoter may be modulated by a polypeptide that is encoded by a gene under the control of a second promoter having a THAP responsive element, however, the first promoter does not comprise a THAP responsive element. In such a case, the activity of the first promoter is indirectly responsive to THAP because transcription is modulated by the polypeptide encoded by the second promoter which is responsive to THAP.

[0948] As used herein, “THAP responsive elements” include, but are not limited to, nucleic acids which comprise one or more of the following nucleotide consensus sequences. The first THAP responsive element consensus sequence comprises the nucleotide sequences GGGCAA or TGGCAA organized as direct repeats with approximately a 5 nucleotide spacing (DR-5 motifs). For example, one consensus sequence is GGGCAAnnnnnTGGCAA (SEQ ID NO: 149). Although GGGCAA and TGGCAA sequences constitute a typical THAP domain DNA binding site (THAP responsive element), GGGCAT, GGGCAG and TGGCAG sequences are also DNA target sequences recognized by the THAP DNA-binding domain. Additionally, a second THAP responsive element consensus sequence comprises the nucleotide sequences TTGCCA or GGGCAA organized as everted repeats with II nucleotide spacing (ER-11 motifs). For example, one consensus sequence is TTGCCAnnnnmnnnnnGGGCAA (SEQ ID NO: 159). Although TTGCCA and GGGCAA sequences constitute a typical THAP responsive element, CTGCCA is also recognized.

[0949] Another THAP responsive element is the THRE consensus sequence which is illustrated in FIG. 24 (SEQ ID NO: 306). In some embodiments of the present invention, THRE is a preferential recognition motif for monomeric THAP-family polypeptides or biologically active fragments thereof. In some embodiments, THRE is preferentially recognized by the THAP1 monomer. Alternatively, in some embodiments, the DR-5 and/or the ER-11 motif is preferentially recognized by a dimer or a multimer of a THAP-family polypeptide or biologically active fragments thereof. In some embodiments, the THAP dimers or multimers comprise THAP1.

[0950] A THAP responsive element can comprise either a single type of consensus nucleotide sequence, multiple types of consensus sequences. For example, a THAP responsive element can comprise one, two, three, four, five or more than five DR-5 consensus sequences. Similarly, a THAP responsive element can comprise one, two, three, four, five or more than five ER-11 consensus sequences. In another example, a THAP responsive element can comprise one, two, three, four, five or more than five THRE consensus sequences. In addition, a THAP responsive element can comprise a mixture of two, three, four, five or more than five DR-5, ER-11 and THRE consensus sequences. Furthermore, any of the aforementioned THAP responsive elements can comprise one or more variants of DR-5, ER-11 or THRE consensus sequences or variants of some or all of DR-5, ER-11 or THRE consensus sequences.

[0951] It will be appreciated that other minor nucleotide sequence variations can occur in THAP responsive element consensus sequences which do not substantially affect the binding of the THAP domain to the THAP responsive element. For example, a THAP responsive element can comprise a nucleic acid having at least 99%, at least 98%, at least 97%, at least 96%, at least 95, at least 94%, at least 93%, at least 92%, at least 91%, at least 90, at least 89%, at least 88%, at least 87%, at least 86%, at least 85, at least 84%, at least 83%, at least 82%, at least 81%, at least 80, at least 75%, at least 70%, at least 65%, at least 60%, at least 55%, or at least 50% nucleotide sequence identity to a consensus sequence for DR-5, ER-11 or THRE.

[0952] In some embodiments of the present invention, the THAP-family polypeptide, THAP domain, THAP-chemokine complex or homologs thereof recognize a THAP responsive element in the promoter of the gene or genes whose transcription is modulated. Alternatively, in other embodiments, the THAP-family polypeptide, THAP domain, THAP-chemokine complex or homologs thereof recognize a THAP responsive element at locations other than the promoter of the gene or genes whose transcription is modulated.

[0953] Upon binding of the THAP responsive element by a THAP-family polypeptide, THAP domain, THAP-chemokine complex or homolog thereof transcription can be modulated. Such modulation may include repression or activation of transcription. Whether transcription is repressed or activated, as well as the extent of repression or activation, can be influenced by many factors, including but not limited to, the number and position of THAP responsive elements, the THAP-family member or homolog that is bound and, in the case of THAP-chemokine complexes, the type of chemokine that forms the THAP chemokine complex.

[0954] In some embodiments, chemokine analogs can be used to bind to THAP-family polypeptides or biologically active fragments thereof. For example, a chemokine can be modified so as to retain its THAP-binding or THAP interaction activity but alter other of its physiological effects. Such chemokine analogs can be used to modulate transcription by allowing recognition and binding of THAP to a THAP responsive element without mediating other of its physiological effects. As used herein, “chemokine analogs” are chemokine homologs having at least 99%, at least 97%, at least 95, at least 93%, at least 90, at least 85, at least 80, at least 75%, at least 70%, at least 65%, at least 60%, at least 50%, at least 40% or at least 30% amino acid identity to a specific chemokine. For example, analogs of SLC comprise polypeptide homologs of SLC having at least 99%, at least 97%, at least 95, at least 93%, at least 90, at least 85, at least 80, at least 75%, at least 70%, at least 65%, at least 60%, at least 50%, at least 40% or at least 30% amino acid identity to SLC. As another example, analogs of CXCL9 comprise polypeptide homologs of CXCL9 having at least 99%, at least 97%, at least 95, at least 93%, at least 90, at least 85, at least 80, at least 75%, at least 70%, at least 65%, at least 60%, at least 50%, at least 40% or at least 30% amino acid identity to CXCL9. Chemokine analogs can also include chemically modified chemokines.

[0955] Some embodiments of the present invention relate to the screening of a test compound to determine whether it is capable of modulating transcription of a nucleic acid under control of a THAP responsive element. A number of constructs can be generated wherein a nucleic acid is placed under control of at least one THAP responsive element. In some embodiments, the construct is introduced into a cell which is responsive to a chemokine. For example, in some embodiments, the constuct is introduced into a cell which is responsive to SLC, such as a cell expressing the CCR7 receptor. In another example, in some embodiments, the constuct is introduced into a cell which is responsive to CXCL9, such as a cell expressing the CXCR3 receptor. For example, a nucleic acid can be operably linked to a promoter comprising one or more THAP responsive elements. The nucleic acid can be nucleic acid which results in a transcript that is capable of detection. The transcript may be detected and quantified by any method known in the art. In some embodiments, the nucleic acid will encode a reporter enzyme, including but not limited to, GFP, luciferase, β-galactosidase, and gus. The activity of such a reporter enzyme can be used to measure the amount of transcription that occurs from the promoter containing the THAP responsive elelments.

[0956] In some embodiments, a THAP-family protein is allowed to contact the construct comprising the nucleic acid that is under control of the THAP responsive element. The THAP-family protein may modulate transcription in the absence of the test compound. Alternatively, the THAP-family protein may only modulate transcription in the presence of a test compound. In either case, the effect of the test compound on the modulation of transcription can be determined by determining the increase or decrease in transcription that is caused by the test compound when compared to the base level of transcription that occurs in the presence of THAP-family protein prior to the addition of test compound. Determining whether the presence of test compound increases or decrease the level of transcription at the THAP responsive element when compared to the level of transcription in the absence of test compound permits the determination of whether the compound modulates transcription of a nucleic acid under the control of a THAP responsive element.

[0957] Certain aspects of the present invention also relate to the use of THAP-family polypeptide-chemokine transcription modulators in the treatment or amelioration of conditions resulting from too much or a deficiency in the transcription of certain genes. Modulation of the interaction of a chemokine with a THAP-family polypeptide can be used in the treatment of an individual suffering from one or more specific conditions. For example, the interaction between chemokines and THAP-family members, such as the polypeptides of SEQ ID NOs: 1-114 can be used modulate transcription of certain genes thereby resulting in suppression of tumorigenesis and/or metastasis, inhibition or stimulation of apoptosis of endothelial cells in angiogenesis-dependent diseases including but not limited to cancer, cardiovascular diseases, inflammatory diseases, and inhibition of apoptosis of neurons in acute and chronic neurodegenerative disorders, including but not limited to Alzheimer's, Parkinson's and Huntington's diseases, amyotrophic lateral sclerosis, HIV encephalitis, stroke, epileptic seizures and malignant tumors.

[0958] In some embodiments chemokine analogs can be used to interact with THAP-family polypeptides so as to treat or otherwise ameliorate the symptoms associated with the above-mentioned conditions.

[0959] It will be appreciated that THAP-type chemokine-binding agents can also be used to modulate transcription as described above. Some embodiments of such modulation of transcription are set out below.

[0960] Transcription Factor Decoys

[0961] Some embodiments of the present invention relate to transcription factor decoys and methods of their use. In some embodiments of the present invention, a transcription factor decoy is any molecule that functions to inhibit or otherwise modulate the effect of a THAP/chemokine complex or a THAP-family polypeptide or a biologically active fragment thereof on gene transcription. In some embodiments, a transcription factor decoy is a molecule that acts as an inhibitor of the interaction between a THAP-family polypeptide or a biologically active fragment thereof and a nucleic acid. Alternatively, a transcription factor decoy can inhibit the interaction between a THAP/chemokine complex and a nucleic acid. For example, the nucleic acid can be a THAP responsive promoter or any other nucleic acid sequence which is involved in the modulation of the expression of a THAP responsive gene or a gene responsive to a THAP/chemokine complex.

[0962] In some embodiments of the present invention, the transcription factor decoy functions to inhibit, lessen or negate the effect of a THAP/chemokine complex or a THAP-family polypeptide or a biologically active fragment thereof on the expression of certain genes. For example, some transcription factor decoys function as competitive inhibitors of the interaction between a nucleic acid and a THAP/chemokine complex or a nucleic acid and a THAP-family polypeptide or a biologically active fragment thereof. In other embodiments, the transcription factor decoy functions as a nonreversible or suicide inhibitor. In yet other embodiments, the transcription factor decoy acts as a reversible inhibitor.

[0963] Some embodiments of the present invention contemplate transcription factor decoys which comprise one or more nucleic acids which comprise or consist essentially of a THAP responsive element. THAP responsive elements that are useful for the construction of transcription factor decoys include, but are not necessarily limited to, DR-5 elements, ER-11 elements and THRE elements. In some embodiments, the transcription factor decoys comprise one or more nucleic acids having a nucleotide sequence selected from the group consisting of SEQ ID NOs: 140-159 and 306. In some embodiments of the present invention, transcription factor decoys comprise a plurality of nucleic acids which comprise one or more THAP responsive elements. In such embodiments, the sequence of the THAP responsive elements may be the same or different.

[0964] Some embodiments of the present invention also contemplates pharmaceutical compositions which one or more transcription factor decoys in a pharmaceutically acceptable carrier. As described above, the pharmaceutical compositions can comprise transcription factor decoys comprising one or more nucleic acid sequences which comprise one or more THAP responsive elements.

[0965] Additional embodiments of the present invention contemplate methods of using transcription factor decoys to inhibit, lessen or otherwise modulate the expression of one or more genes that are responsive to a THAP/chemokine complex or one or more genes that are responsive to a THAP-family polypeptide or a fragment thereof.

[0966] Effect of Interactions Between Chemokines and Thap-Type Chemokine-Binding Agents

[0967] Some embodiments of the present invention relate to methods of modulating chemokine interactions with cellular receptors. Such receptors can be extracellular or can be molecules that are present within the cell. For example, chemokines SLC and ELC can bind to extracellular chemokine receptors CCR7 and CCR11. The chemokine CCL5 binds to extracellular chemokine receptors CCR1, CCR3 and CCR5. The CXCL-family chemokines, CXCL9 and CXCL10, bind to the extracellular chemokine receptor, CXCR3. Other chemokine interactions with receptors are also known in the art and are included in Ransohoff, R. M. and Karpus, W. J. (2001). Roles of Chemokines and Their Receptors in the Induction and Regulation of Autoimmune Disease, in Contemporary Clinical Neuroscience: Cytokines and Autoimmune Diseases, V. K. Kuchroo, et al., eds. Humana Press, Totowa, N.J., pages 157-191, the disclosure of which is incorporated herein by reference in its entirety.

[0968] In some embodiments of the present invention the interaction of chemokines with extracellular receptors are enhanced or inhibited by providing to a cell, which expresses one or more extracellular chemokine receptors, a THAP-type chemokine-binding agent. Such extracellular receptors can include, but are not limited to, CCR1, CCR2, CCR3, CCR4, CCR5, CCR6, CCR7, CCR8, CCR9, CCR10, CCR11, CXCR1, CXCR2, CXCR3, CXCR4 and CXCR5. In some embodiments of the present invention, a THAP-type chemokine-binding agent binds to or otherwise interacts with a chemokine thereby forming a complex which binds to the extracellular receptor with more or less affinity. In some embodiments, chemokine interaction with one or more extracellular receptors is modulated by providing one or more THAP-type chemokine-binding agents.

[0969] Other aspects of the present invention relate to modulating the movement of a chemokine from the outside of a cell to the inside of the cell. For example, modulation of chemokine interaction with one or more extracellular receptors can increase or decrease the uptake of chemokines into the cell. In some embodiments of the present invention, chemokine uptake into a cell is modulated by providing THAP-type chemokine-binding agent either in vitro or in vivo in the proximity of cell which expresses one or more chemokine receptors. The THAP-type chemokine-binding agent binds to or otherwise interacts with one or more chemokines including, but not limited to, XCL1, XCL2, CCL1, CCL2, CCL3, CCL3L1, SCYA3L2, CCL4, CCL4L, CCL5, CCL6, CCL7, CCL8, SCYA9, SCYA10, CCL11, SCYA12, CCL13, CCL14, CCL15, CCL16, CCL17, CCL18, CCL19, CCL20, CCL21, CCL22, CCL23, CCL24, CCL25, CCL26, CCL27, CCL28, clone 391, CARP CC-1, CCL1, CK-1, regakine-1, K203, CXCL1, CXCL1P, CXCL2, CXCL3, PF4, PF4V1, CXCL5, CXCL6, PPBP, SPBPBP, IL8, CXCL9, CXCL10, CXCL11, CXCL12, CXCL14, CXCL15, CXCL16, NAP-4, LFCA-1, Scyba, JSC, VHSV-induced protein, CX3CL1 and fCL1 thereby modulating the uptake of the chemokine into the cell.

[0970] In some embodiments, THAP-type chemokine-binding agents form a complex with one or more chemokines inside the cell nucleus. In such embodiments, a THAP-type chemokine-binding agent is provided to a cell such that the THAP-type chemokine-binding agent binds to or otherwise interacts with one or more chemokines. The THAP-type chemokine-binding agent can be provided to cells both in vitro and in vivo. In some embodiments, the THAP-type chemokine-binding agent is provided extracellularly wherein it is taken up by the cell either prior to or after binding to a chemokine. In other embodiments, a the THAP-type chemokine-binding agent is provided inside the cell. For example, a nucleic acid encoding a THAP-type chemokine-binding agent is introduced into a cell such that the THAP-type chemokine-binding agent is expressed inside the cell. Methods of introducing expressible recombinant nucleic acids into a cell are well known in the art. In some embodiments of the present invention, the nucleic acid encoding the THAP-type chemokine-binding agent is placed under the control of a constitutive promoter. In other embodiments, the promoter which controls expression of the THAP-type chemokine-binding agent is regulatable. Chemokines which contact or enter the nucleus are bound by THAP-type chemokine-binding agent with has been introduced into the cell. For example, a nucleic acid encoding a full-length THAP1 polypeptide can be placed under control of a regulatable promoter such that, upon induction, the polypeptide is expressed then localized to the nucleus. The THAP1 that is present in the nucleus binds to SLC which has been transported to the nucleus thereby forming a THAP1/SLC complex. It will be appreciated that other methods can also be used to introduce THAP-type chemokine-binding agents into a cell. Additionally, it will be appreciated that more than one type of THAP-type chemokine-binding agent can be introduced into a cell.

[0971] In some embodiments, THAP-type chemokine-binding agents can be introduced into the cytoplasm of the cell. In such embodiments, the THAP-type chemokine-binding agents that are present in the cytoplasm of the cell can be used in the formation of complexes with one or more chemokines. The formation of such complexes modulate the transport of chemokine into the nucleus.

[0972] In some embodiments of the present invention, chemokines or complexes comprising chemokines and THAP-type chemokine-binding agents that are present within the nucleus of the cell modulate gene expression. In such embodiments, the expression of one or more genes which are under the control of a THAP responsive promoter are modulated. In some embodiments, a THAP responsive promoter includes one or more THAP responsive elements. In other embodiments, a THAP responsive promoter need not comprise a THAP responsive element, but rather, the promoter is responsive to a gene product that is produced by a gene that is under the control of a promoter containing one or more THAP responsive elements. Such THAP responsive promoters have been described in detail above.

[0973] The THAP-type chemokine-binding agent that is used to modulate transcription of a THAP responsive promoter can be any THAP-type chemokine-binding agent; however, some preferred agents include THAP1 and polypeptides comprising an amino acid sequence having at least 99%, at least 98%, at least 97%, at least 96%, at least 95%, at least 94%, at least 93%, at least 92%, at least 91%, at least 90%, at least 89%, at least 88%, at least 87%, at least 86%, at least 85%, at least 84%, at least 83%, at least 82%, at least 81%, at least 80%, at least 75%, at least 70%, at least 65%, at least 60%, at least 55%, at least 50%, at least 45%, at least 40%, at least 35%, or at least 30% amino acid sequence identity with the amino acid of SEQ ID NO: 3. In other embodiments, the THAP-type chemokine-binding agent is a polypeptide having an amino acid sequence selected from the group consisting of SEQ ID NOs: 1-114 or homologs thereof.

[0974] Chemokines which are useful in the modulation of transcription can be any chemokine which binds to or otherwise interacts with a THAP-type chemokine-binding agent. Such chemokines include, but are not limited to, XCL1, XCL2, CCL1, CCL2, CCL3, CCL3L1, SCYA3L2, CCL4, CCL4L, CCL5, CCL6, CCL7, CCL8, SCYA9, SCYA10, CCL11, SCYA12, CCL13, CCL14, CCL15, CCL16, CCL17, CCL18, CCL19, CCL20, CCL21, CCL22, CCL23, CCL24, CCL25, CCL26, CCL27, CCL28, clone 391, CARP CC-1, CCL1, CK-1, regakine-1, K203, CXCL1, CXCL1P, CXCL2, CXCL3, PF4, PF4V1, CXCL5, CXCL6, PPBP, SPBPBP, IL8, CXCL9, CXCL10, CXCL11, CXCL12, CXCL14, CXCL15, CXCL16, NAP-4, LFCA-1, Scyba, JSC, VHSV-induced protein, CX3CL1 and fCL1. In some embodiments, polypeptides that are homologous to one or more of the above-described chemokines can form a complex with a THAP-type chemokine-binding agent thereby modulating transcription at a THAP responsive promoter. Such homologs can include polypeptides comprising an amino acid sequence having at least 99%, at least 98%, at least 97%, at least 96%, at least 95%, at least 94%, at least 93%, at least 92%, at least 91%, at least 90%, at least 89%, at least 88%, at least 87%, at least 86%, at least 85%, at least 84%, at least 83%, at least 82%, at least 81%, at least 80%, at least 75%, at least 70%, at least 65%, at least 60%, at least 55%, at least 50%, at least 45%, at least 40%, at least 35%, or at least 30% amino acid sequence identity with the amino acid sequence of any of the above-described chemokines. In some preferred embodiments of the present invention, one or more chemokines having an amino acid sequence selected from the group consisting of SEQ ID NOs: 271, 273, 275, 277 and 289 form a complex with one or more THAP-type chemokine-binding agents thereby modulating transcription at a THAP responsive promoter. In other embodiments, chemokines comprising an amino acid sequence having at least 99%, at least 98%, at least 97%, at least 96%, at least 95%, at least 94%, at least 93%, at least 92%, at least 91%, at least 90%, at least 89%, at least 88%, at least 87%, at least 86%, at least 85%, at least 84%, at least 83%, at least 82%, at least 81%, at least 80%, at least 75%, at least 70%, at least 65%, at least 60%, at least 55%, at least 50%, at least 45%, at least 40%, at least 35%, or at least 30% amino acid sequence identity with the amino acid sequence of a chemokine selected from the group consisting of SEQ ID NOs: 271, 273, 275, 277 and 289 form a complex with one or more THAP-type chemokine-binding agents thereby modulating transcription at a THAP responsive promoter.

[0975] Primers and Probes

[0976] Primers and probes of the invention can be prepared by any suitable method, including, for example, cloning and restriction of appropriate sequences and direct chemical synthesis by a method such as the phosphodiester method of Narang S A et al (Methods Enzymol 1979;68:90-98), the phosphodiester method of Brown E L et al (Methods Enzymol 1979;68:109-15 1), the diethylphosphoramidite method of Beaucage et al (Tetrahedron Lett 1981, 22: 1859-1862) and the solid support method described in EP 0 707 592, the disclosures of which are incorporated herein by reference in their entireties.

[0977] Detection probes are generally nucleic acid sequences or uncharged nucleic acid analogs such as, for example peptide nucleic acids which are disclosed in International Patent Application WO 92/20702, morpholino analogs which are described in U.S. Pat. Nos. 5,185,444; 5,034,506 and 5,142,047. If desired, the probe may be rendered “non-extendable” in that additional dNTPs cannot be added to the probe. In and of themselves analogs usually are non-extendable and nucleic acid probes can be rendered non-extendable by modifying the 3′ end of the probe such that the hydroxyl group is no longer capable of participating in elongation. For example, the 3′ end of the probe can be functionalized with the capture or detection label to thereby consume or otherwise block the hydroxyl group.

[0978] Any of the polynucleotides of the present invention can be labeled, if desired, by incorporating any label known in the art to be detectable by spectroscopic, photochemical, biochemical, immunochemical, or chemical means. For example, useful labels include radioactive substances (including, ³²P, ³⁵S, ³H, ¹²⁵I), fluorescent dyes (including, 5-bromodesoxyuridin, fluorescein, acetylaminofluorene, digoxigenin) or biotin. Preferably, polynucleotides are labeled at their 3′ and 5′ ends. Examples of non-radioactive labeling of nucleic acid fragments are described in (Urdea et al. (Nucleic Acids Research. 11:4937-4957, 1988) or Sanchez-Pescador et al. (J. Clin. Microbiol. 26(10):1934-1938, 1988). In addition, the probes according to the present invention may have structural characteristics such that they allow the signal amplification, such structural characteristics being, for example, branched DNA probes as those described by Urdea et al (Nucleic Acids Symp. Ser. 24:197-200, 1991) or in the European patent No. EP 0 225 807 (Chiron).

[0979] A label can also be used to capture the primer, so as to facilitate the immobilization of either the primer or a primer extension product, such as amplified DNA, on a solid support. A capture label is attached to the primers or probes and can be a specific binding member which forms a binding pair with the solid's phase reagent's specific binding member (e.g. biotin and streptavidin). Therefore depending upon the type of label carried by a polynucleotide or a probe, it may be employed to capture or to detect the target DNA. Further, it will be understood that the polynucleotides, primers or probes provided herein, may, themselves, serve as the capture label. For example, in the case where a solid phase reagent's binding member is a nucleic acid sequence, it may be selected such that it binds a complementary portion of a primer or probe to thereby immobilize the primer or probe to the solid phase. In cases where a polynucleotide probe itself serves as the binding member, those skilled in the art will recognize that the probe will contain a sequence or “tail” that is not complementary to the target. In the case where a polynucleotide primer itself serves as the capture label, at least a portion of the primer will be free to hybridize with a nucleic acid on a solid phase. DNA labeling techniques are well known to the skilled technician.

[0980] The probes of the present invention are useful for a number of purposes. They can be notably used in Southern hybridization to genomic DNA. The probes can also be used to detect PCR amplification products. They may also be used to detect mismatches in a THAP-family gene or mRNA using other techniques.

[0981] Any of the nucleic acids, polynucleotides, primers and probes of the present invention can be conveniently immobilized on a solid support. Solid supports are known to those skilled in the art and include the walls of wells of a reaction tray, test tubes, polystyrene beads, magnetic beads, nitrocellulose strips, membranes, microparticles such as latex particles, sheep (or other animal) red blood cells, duracytes and others. The solid support is not critical and can be selected by one skilled in the art. Thus, latex particles, microparticles, magnetic or non-magnetic beads, membranes, plastic tubes, walls of microtiter wells, glass or silicon chips, sheep (or other suitable animal's) red blood cells and duracytes are all suitable examples. Suitable methods for immobilizing nucleic acids on solid phases include ionic, hydrophobic, covalent interactions and the like. A solid support, as used herein, refers to any material which is insoluble, or can be made insoluble by a subsequent reaction. The solid support can be chosen for its intrinsic ability to attract and immobilize the capture reagent. Alternatively, the solid phase can retain an additional receptor which has the ability to attract and immobilize the capture reagent. The additional receptor can include a charged substance that is oppositely charged with respect to the capture reagent itself or to a charged substance conjugated to the capture reagent. As yet another alternative, the receptor molecule can be any specific binding member which is immobilized upon (attached to) the solid support and which has the ability to immobilize the capture reagent through a specific binding reaction. The receptor molecule enables the indirect binding of the capture reagent to a solid support material before the performance of the assay or during the performance of the assay. The solid phase thus can be a plastic, derivatized plastic, magnetic or non-magnetic metal, glass or silicon surface of a test tube, microtiter well, sheet, bead, microparticle, chip, sheep (or other suitable animal's) red blood cells, duracytes and other configurations known to those of ordinary skill in the art. The nucleic acids, polynucleotides, primers and probes of the invention can be attached to or immobilized on a solid support individually or in groups of at least 2, 5, 8, 10, 12, 15, 20, or 25 distinct polynucleotides of the invention to a single solid support. In addition, polynucleotides other than those of the invention may be attached to the same solid support as one or more polynucleotides of the invention.

[0982] Any polynucleotide provided herein may be attached in overlapping areas or at random locations on a solid support. Alternatively the polynucleotides of the invention may be attached in an ordered array wherein each polynucleotide is attached to a distinct region of the solid support which does not overlap with the attachment site of any other polynucleotide. Preferably, such an ordered array of polynucleotides is designed to be “addressable” where the distinct locations are recorded and can be accessed as part of an assay procedure. Addressable polynucleotide arrays typically comprise a plurality of different oligonucleotide probes that are coupled to a surface of a substrate in different known locations. The knowledge of the precise location of each polynucleotides location makes these “addressable” arrays particularly useful in hybridization assays. Any addressable array technology known in the art can be employed with the polynucleotides of the invention. One particular embodiment of these polynucleotide arrays is known as the Genechips, and has been generally described in U.S. Pat. No. 5,143,854; PCT publications WO 90/15070 and 92/10092, the disclosures of which are incorporated herein by reference in their entireties.

[0983] Recombinant Expression Vectors and Host Cells

[0984] Another aspect of the invention pertains to vectors, preferably expression vectors, containing a nucleic acid encoding a THAP family or THAP domain polypeptide, or a biologically active fragment or homologue thereof.

[0985] Vectors may have particular use in the preparation of a recombinant protein of the invention, or for use in gene therapy. Gene therapy presents a means to deliver a THAP family or THAP domain polypeptide, or a biologically active fragment or homologue thereof to a subject in order to regulate apoptosis for treatment of a disorder.

[0986] As used herein, the term “vector” refers to a nucleic acid molecule capable of transporting another nucleic acid to which it has been linked. One type of vector is a “plasmid”, which refers to a circular double stranded DNA loop into which additional DNA segments can be ligated. Another type of vector is a viral vector, wherein additional DNA segments can be ligated into the viral genome. Certain vectors are capable of autonomous replication in a host cell into which they are introduced (e.g., bacterial vectors having a bacterial origin of replication and episomal mammalian vectors). Other vectors (e.g., non-episomal mammalian vectors) are integrated into the genome of a host cell upon introduction into the host cell, and thereby are replicated along with the host genome. Moreover, certain vectors are capable of directing the expression of genes to which they are operatively linked. Such vectors are referred to herein as “expression vectors”. In general, expression vectors of utility in recombinant DNA techniques are often in the form of plasmids. In the present specification, “plasmid” and “vector” can be used interchangeably as the plasmid is the most commonly used form of vector. However, the invention is intended to include such other forms of expression vectors, such as viral vectors (e.g., replication defective retroviruses, adenoviruses and adeno-associated viruses), which serve equivalent functions.

[0987] The recombinant expression vectors of the invention comprise a THAP-family or THAP domain nucleic acid of the invention in a form suitable for expression of the nucleic acid in a host cell, which means that the recombinant expression vectors include one or more regulatory sequences, selected on the basis of the host cells to be used for expression, which is operatively linked to the nucleic acid sequence to be expressed. Within a recombinant expression vector, “operably linked” is intended. to mean that the nucleotide sequence of interest is linked to the regulatory sequence(s) in a manner which allows for expression of the nucleotide sequence (for example, in an in vitro transcription/translation system or in a host cell when the vector is introduced into the host cell). The term “regulatory sequence” is intended to include promoters, enhancers and other expression control elements (e.g., polyadenylation signals). Such regulatory sequences are described, for example, in Goeddel; Gene Expression Technology: Methods in Enzymology 185, Academic Press, San Diego, Calif. (1990), the disclosure of which is incorporated herein by reference in its entirety. Regulatory sequences include those which direct constitutive expression of a nucleotide sequence in many types of host cell and those which direct expression of the nucleotide sequence only in certain host cells (e.g., tissue-specific regulatory sequences). It will be appreciated by those skilled in the art that the design of the expression vector can depend on such factors as the choice of the host cell to be transformed, the level of expression of protein desired, etc. The expression vectors of the invention can be introduced into host cells to thereby produce proteins or peptides, including fusion proteins or peptides, encoded by nucleic acids as described herein (e.g., THAP-family proteins, mutant forms of THAP-family proteins, fusion proteins, or fragments of any of the preceding proteins, etc.).

[0988] The recombinant expression vectors of the invention can be designed for expression of a THAP family or THAP domain polypeptide, or a biologically active fragment or homologue thereof in prokaryotic or eukaryotic cells. For example, THAP-family or THAP domain proteins can be expressed in bacterial cells such as E. coli, insect cells (using baculovirus expression vectors) yeast cells, or mammalian cells. Suitable host cells are discussed further in Goeddel, Gene Expression Technology: Methods in Enzymology 185, Academic Press, San Diego, Calif. (1990), the disclosure of which is incorporated herein by reference in its entirety. Alternatively, the recombinant expression vector can be transcribed and translated in vitro, for example using T7 promoter regulatory sequences and T7 polymerase.

[0989] Expression of proteins in prokaryotes is most often carried out in E. coli with vectors containing constitutive or inducible promoters directing the expression of either fusion or non-fusion proteins. Fusion vectors add a number of amino acids to a protein encoded therein, usually to the amino terminus of the recombinant protein. Such fusion vectors typically serve three purposes: 1) to increase expression of recombinant protein; 2) to increase the solubility of the recombinant protein; and 3) to aid in the purification of the recombinant protein by acting as a ligand in affinity purification. Often, in fusion expression vectors, a proteolytic cleavage site is introduced at the junction of the fusion moiety and the recombinant protein to enable separation of the recombinant protein from the fusion moiety subsequent to purification of the fusion protein. Such enzymes, and their cognate recognition sequences, include Factor Xa, thrombin and enterokinase. Typical fusion expression vectors include pGEX (Pharmacia Biotech Inc; Smith, D. B. and Johnson, K. S. (1988) Gene 67:31-40), pMAL (New England Biolabs, Beverly, Mass.) and pRIT5 (Pharmacia, Piscataway, N.J.), the disclosures of which are incorporated herein by reference in their entireties, which fuse glutathione S-transferase (GST), maltose E binding protein, or protein A, respectively, to the target recombinant protein.

[0990] Purified fusion proteins can be utilized in THAP-family activity assays, (for example, direct assays or competitive assays described in detail below), or to generate antibodies specific for THAP-family or THAP domain proteins, for example. In a preferred embodiment, a THAP-family or THAP domain fusion protein expressed in a retroviral expression vector of the present invention can be utilized to infect bone marrow cells which are subsequently transplanted into irradiated recipients. The pathology of the subject recipient is then examined after sufficient time has passed (for example, six (6) weeks).

[0991] Examples of suitable inducible non-fusion E. coli expression vectors include pTrc (Amann et al., (1988) Gene 69:301-315) and pET 11d (Studier et al., Gene Expression Technology: Methods in Enzymology 185, Academic Press, San Diego, Calif. (1990) 60-89), the disclosures of which are incorporated herein by reference in their entireties. Target gene expression from the pTrc vector relies on host RNA polymerase transcription from a hybrid trp-lac fusion promoter. Target gene expression from the pET 11d vector relies on transcription from a T7 gn10-lac fusion promoter mediated by a coexpressed viral RNA polymerase (T7 gn 1). This viral polymerase is supplied by host strains BL21 (DE3) or HMS174(DE3) from a resident prophage harboring a T7 gn1 gene under the transcriptional control of the lacUV 5 promoter.

[0992] One strategy to maximize recombinant protein expression in E. coli is to express the protein in a host bacteria with an impaired capacity to proteolytically cleave the recombinant protein (Gottesman, S., Gene Expression Technology: Methods in Enzymology 185, Academic Press, San Diego, Calif (1990) 119-128, the disclosure of which is incorporated herein by reference in its entirety). Another strategy is to alter the nucleic acid sequence of the nucleic acid to be inserted into an expression vector so that the individual codons for each amino acid are those preferentially utilized in E. coli (Wada et al., (1992) Nucleic Acids Res. 20:2111-2118, the disclosure of which is incorporated herein by reference in its entirety). Such alteration of nucleic acid sequences of the invention can be carried out by standard DNA synthesis techniques.

[0993] In another embodiment, the THAP-family expression vector is a yeast expression vector. Examples of vectors for expression in yeast S. cerivisae include pYepSec 1 (Baldari, et al., (1987) Embo J. 6:229-234), pMFa (Kudjan and Herskowitz, (1982) Cell 30:933-943), pJRY88 (Schultz et al., (1987) Gene 54:113-123), pYES2 (Invitrogen Corporation, San Diego, Calif.), and picZ (InVitrogen Corp, San Diego, Calif.), the disclosures of which are incorporated herein by reference in their entireties.

[0994] Alternatively, THAP-family or THAP domain proteins can be expressed in insect cells using baculovirus expression vectors. Baculovirus vectors available for expression of proteins in cultured insect cells (e.g., Sf 9 cells) include the pAc series (Smith et al. (1983) Mol. Cell Biol. 3:2156-2165) and the pVL series (Lucklow and Summers (1989) Virology 170:31-39), the disclosures of which are incorporated herein by reference in their entireties. In particularly preferred embodiments, THAP-family proteins are expressed according to Karniski et al, Am. J. Physiol. (1998) 275: F79-87, the disclosure of which is incorporated herein by reference in its entirety.

[0995] In yet another embodiment, a nucleic acid of the invention is expressed in mammalian cells using a mammalian expression vector. Examples of mammalian expression vectors include pCDM8 (Seed, B. (1987) Nature 329:840) and pMT2PC (Kaufman et al. (1987) EMBO J. 6:187-195), the disclosures of which are incorporated herein by reference in their entireties. When used in mammalian cells, the expression vector's control functions are often provided by viral regulatory elements. For example, commonly used promoters are derived from polyoma, Adenovirus 2, cytomegalovirus and Simian Virus 40. For other suitable expression systems for both prokaryotic and eukaryotic cells see chapters 16 and 17 of Sambrook, J., Fritsh, E. F., and Maniatis, T. Molecular Cloning: A Laboratory Manual. 2nd, ed., Cold Spring Harbor Laboratory, Cold Spring Harbor Laboratory Press, Cold Spring Harbor, N.Y., 1989, the disclosure of which is incorporated herein by reference in its entirety. In another embodiment, the recombinant mammalian expression vector is capable of directing expression of the nucleic acid preferentially in a particular cell type (e.g., tissue-specific regulatory elements are used to express the nucleic acid). Tissue-specific regulatory elements are known in the art, and are further described below.

[0996] The invention further provides a recombinant expression vector comprising a DNA molecule of the invention cloned into the expression vector in an antisense orientation. That is, the DNA molecule is operatively linked to a regulatory sequence in a manner which allows for expression (by transcription of the DNA molecule) of an RNA molecule which is antisense to THAP-family mRNA. Regulatory sequences operatively linked to a nucleic acid cloned in the antisense orientation can be chosen which direct the continuous expression of the antisense RNA molecule in a variety of cell types, for instance viral promoters and/or enhancers, or regulatory sequences can be chosen which direct constitutive, tissue specific or cell type specific expression of antisense RNA. The antisense expression vector can be in the form of a recombinant plasmid, phagemid or attenuated virus in which antisense nucleic acids are produced under the control of a high efficiency regulatory region, the activity of which can be determined by the cell type into which the vector is introduced. For a discussion of the regulation of gene expression using antisense genes see Weintraub, H. et al., Antisense RNA as a molecular tool for genetic analysis, Reviews—Trends in Genetics, Vol. 1(1) 1986, the disclosure of which is incorporated herein by reference in its entirety.

[0997] Another aspect of the invention pertains to host cells into which a recombinant expression vector of the invention has been introduced. The terms “host cell” and “recombinant host cell” are used interchangeably herein. It is understood that such term refer not only to the particular subject cell but to the progeny or potential progeny of such a cell. Because certain modifications may occur in succeeding generations due to either mutation or environmental influences, such progeny may not, in fact, be identical to the parent cell, but are still included within the scope of the term as used herein.

[0998] A host cell can be any prokaryotic or eukaryotic cell. For example, a THAP-family protein can be expressed in bacterial cells such as E. coli, insect cells, yeast or mammalian cells (such as Chinese hamster ovary cells (CHO) or COS cells or human cells). Other suitable host cells are known to those skilled in the art, including mouse 3T3 cells as further described in the Examples.

[0999] Vector DNA can be introduced into prokaryotic or eukaryotic cells via conventional transformation or transfection techniques. As used herein, the terms “transformation” and “transfection” are intended to refer to a variety of art-recognized techniques for introducing foreign nucleic acid (e.g., DNA) into a host cell, including calcium phosphate or calcium chloride co-precipitation, DEAE-dextran-mediated transfection, lipofection, or electroporation. Suitable methods for transforming or transfecting host cells can be found in Sambrook, et al. (Molecular Cloning: A Laboratory Manual. 2nd, ed., Cold Spring Harbor Laboratory, Cold Spring Harbor Laboratory Press, Cold Spring Harbor, N.Y., 1989, the disclosure of which is incorporated herein by reference in its entirety), and other laboratory manuals.

[1000] For stable transfection of mammalian cells, it is known that, depending upon the expression vector and transfection technique used, only a small fraction of cells may integrate the foreign DNA into their genome. In order to identify and select these integrants, a gene that encodes a selectable marker (e.g., resistance to antibiotics) is generally introduced into the host cells along with the gene of interest. Preferred selectable markers include those which confer resistance to drugs, such as G418, hygromycin and methotrexate. Nucleic acid encoding a selectable marker can be introduced into a host cell on the same vector as that encoding a THAP-family protein or can be introduced on a separate vector. Cells stably transfected with the introduced nucleic acid can be identified by drug selection (e.g., cells that have incorporated the selectable marker gene will survive, while the other cells die).

[1001] A host cell of the invention, such as a prokaryotic or eukaryotic host cell in culture, can be used to produce (i.e., express) a THAP-family protein. Accordingly, the invention further provides methods for producing a THAP-family protein using the host cells of the invention. In one embodiment, the method comprises culturing the host cell of invention (into which a recombinant expression vector encoding a THAP-family protein has been introduced) in a suitable medium such that a THAP-family protein is produced. In another embodiment, the method further comprises isolating a THAP-family protein from the medium or the host cell.

[1002] In another embodiment, the invention encompasses a method comprising: providing a cell capable of expressing a THAP family or THAP domain polypeptide, or a biologically active fragment or homologue thereof, culturing said cell in a suitable medium such that a THAP-family or THAP domain protein is produced, and isolating or purifying the THAP-family or THAP domain protein from the medium or cell.

[1003] The host cells of the invention can also be used to produce nonhuman transgenic animals, such as for the study of disorders in which THAP family proteins are implicated. For example, in one embodiment, a host cell of the invention is a fertilized oocyte or an embryonic stem cell into which THAP-family- or THAP domain-coding sequences have been introduced. Such host cells can then be used to create non-human transgenic animals in which exogenous THAP-family or THAP domain sequences have been introduced into their genome or homologous recombinant animals in which endogenous THAP-family or THAP domain sequences have been altered. Such animals are useful for studying the function and/or activity of a THAP-family or THAP domain polypeptide or fragment thereof and for identifying and/or evaluating modulators of a THAP-family or THAP domain activity. As used herein, a “transgenic animal” is a non-human animal, preferably a mammal, more preferably a rodent such as a rat or mouse, in which one or more of the cells of the animal includes a transgene. Other examples of transgenic animals include non-human primates, sheep, dogs, cows, goats, chickens, amphibians, etc. A transgene is exogenous DNA which is integrated into the genome of a cell from which a transgenic animal develops and which remains in the genome of the mature animal, thereby directing the expression of an encoded gene product in one or more cell types or tissues of the transgenic animal. As used herein, a “homologous recombinant animal” is a non-human animal, preferably a mammal, more preferably a mouse, in which an endogenous THAP-family or THAP domain gene has been altered by homologous recombination between the endogenous gene and an exogenous DNA molecule introduced into a cell of the animal, e.g., an embryonic cell of the animal, prior to development of the animal. Methods for generating transgenic animals via embryo manipulation and microinjection, particularly animals such as mice, have become conventional in the art and are described, for example, in U.S. Pat. Nos. 4,736,866 and 4,870,009, both by Leder et al., U.S. Pat. No. 4,873,191 by Wagner et al. and in Hogan, B., Manipulating the Mouse Embryo, (Cold Spring Harbor Laboratory Press, Cold Spring Harbor, N.Y., 1986, the disclosures of which are incorporated herein by reference in their entireties).

[1004] Gene Therapy Vectors

[1005] Preferred vectors for administration to a subject can be constructed according to well known methods. Vectors will comprise regulatory elements (e.g. promoter, enhancer, etc) capable of directing the expression of the nucleic acid in the targeted cell. Thus, where a human cell is targeted, it is preferable to position the nucleic acid coding region adjacent to and under the control of a promoter that is capable of being expressed in a human cell.

[1006] In various embodiments, the human cytornegalovirus (CMV) immediate early gene promoter, the SV40 early promoter, the Rous sarcoma virus long terminal repeat, P actin, rat insulin promoter and glyceraldehyde-3-phosphate dehydrogenase can be used to obtain high-level expression of the coding sequence of interest. The use of other viral or mammalian cellular or bacterial phage promoters which are well-known in the art to achieve expression of a coding sequence of interest is contemplated as well, provided that the levels of expression are sufficient for a given purpose. By employing a promoter with well-known properties, the level and pattern of expression of the protein of interest following transfection or transformation can be optimized.

[1007] Selection of a promoter that is regulated in response to specific physiologic or synthetic signals can permit inducible expression of the gene product. For example in the case where expression of a transgene, or transgenes when a multicistronic vector is utilized, is toxic to the cells in which the vector is produced in, it may be desirable to prohibit or reduce expression of one or more of the transgenes. Several inducible promoter systems are available for production of viral vectors where the transgene product may be toxic.

[1008] The ecdysone system (Invitrogen, Carlsbad, Calif.) is one such system. This system is designed to allow regulated expression of a gene of interest in mammalian cells. It consists of a tightly regulated expression mechanism that allows virtually no basal level expression of the transgene, but over 200-fold inducibility. The system is based on the heterodimeric ecdysone receptor of Drosophila, and when ecdysone or an analog such as muristerone A binds to the receptor, the receptor activates a promoter to turn on expression of the downstream transgene high levels of mRNA transcripts are attained. In this system, both monomers of the heterodimeric receptor are constituitively expressed from one vector, whereas the ecdysone-responsive promoter which drives expression of the gene of interest is on another plasmid. Engineering of this type of system into the gene transfer vector of interest would therefore be useful. Cotransfection of plasmids containing the gene of interest and the receptor monomers in the producer cell line would then allow for the production of the gene transfer vector without expression of a potentially toxic transgene. At the appropriate time, expression of the transgene could be activated with ecdysone or muristeron A. Another inducible system that would be useful is the Tet-Off or Tet On system (Clontech, Palo Alto, Calif.) originally developed by Gossen and Bujard (Gossen and Bujard, 1992; Gossen et al, 1995). This system also allows high levels of gene expression to be regulated in response to tetracycline or tetracycline derivatives such as doxycycline. In the Tet-On system, gene expression is turned on in the presence of doxycycline, whereas in the Tet-Off system, gene expression is turned on in the absence of doxycycline. These systems are based on two regulatory elements derived from the tetracycline resistance operon of E. coli. The tetracycline operator sequence to which the tetracycline repressor binds, and the tetracycline repressor protein. The gene of interest is cloned into a plasmid behind a promoter that has tetracycline-responsive elements present in it. A second plasmid contains a regulatory element called the tetracycline-controlled transactivator, which is composed, in the Tet Off system, of the VP16 domain from the herpes simplex virus and the wild-type tertracycline repressor.

[1009] Thus in the absence of doxycycline, transcription is constituitively on. In the Tet-On™ system, the tetracycline repressor is not wild-type and in the presence of doxycycline activates transcription. For gene therapy vector production, the Tet Off system would be preferable so that the producer cells could be grown in the presence of tetracycline or doxycycline and prevent expression of a potentially toxic transgene, but when the vector is introduced to the patient, the gene expression would be constituitively on.

[1010] In some circumstances, it may be desirable to regulate expression of a transgene in a gene therapy vector. For example, different viral promoters with varying strengths of activity may be utilized depending on the level of expression desired. In mammalian cells, the CMV immediate early promoter if often used to provide strong transcriptional activation. Modified versions of the CMV promoter that are less potent have also been used when reduced levels of expression of the transgene are desired. When expression of a transgene in hematopoetic_cells is desired, retroviral promoters such as the LTRs from MLV or MMTV are often used. Other viral promoters that may be used depending on the desired effect include SV40, RSV LTR, HIV-1 and HfV-2 LTR, adenovirus promoters such as from the EIA, E2A, or MLP region, AAV LTR, cauliflower mosaic virus, HSV-TK, and avian sarcoma virus.

[1011] Similarly tissue specific promoters may be used to effect transcription in specific tissues or cells so as to reduce potential toxicity or undesirable effects to non-targeted tissues. For example, promoters such as the PSA, probasin, prostatic acid phosphatase or prostate-specific glandular kallikrein (hK2) may be used to target gene expression in the prostate. Similarly, promoters as follows may be used to target gene expression in other tissues.

[1012] Tissue specific promoters include in (a) pancreas: insulin, elastin, amylase, pdr-I, pdx-I, glucokinase; (b) liver: albumin PEPCK, HBV enhancer, alpha fetoprotein, apolipoprotein C, alpha-I antitrypsin, vitellogenin, NF-AB, Transthyretin; (c) skeletal muscle: myosin H chain, muscle creatine kinase, dystrophin, calpain p94, skeletal alpha-actin, fast troponin 1; (d) skin: keratin K6, keratin KI; (e) lung: CFTR, human cytokeratin IS (K 18), pulmonary surfactant proteins A, B and C, CC-10, Pi; (f) smooth muscle: sm22 alpha, SM-alpha-actin; (g) endothelium: endothelin-I, E-selectin, von Willebrand factor, TIE (Korhonen et al., 1995), KDR/flk-I; (h) melanocytes: tyrosinase; (i) adipose tissue: lipoprotein lipase (Zechner et al., 1988), adipsin (Spiegelman et al., 1989), acetyl-CoA carboxylase (Pape and Kim, 1989), glycerophosphate dehydrogenase (Dani et al., 1989), adipocyte P2 (Hunt et al., 1986); and (j) blood: P-globin.

[1013] In certain indications, it may be desirable to activate transcription at specific times after administration of the gene therapy vector. This may be done with such promoters as those that are hormone or cytokine regulatable. For example in gene therapy applications where the indication is in a gonadal tissue where specific steroids are produced or routed to, use of androgen or estrogen regulated promoters may be advantageous. Such promoters that are hormone regulatable include MMTV, MT-1, ecdysone and RuBisco. Other hormone regulated promoters such as those responsive to thyroid, pituitary and adrenal hormones are expected to be useful in the present invention. Cytokine and inflammatory protein responsive promoters that could be used include K and T Kininogen (Kageyama et al., 1987), c-fos, TNF-alpha, C-reactive protein (Arcone et al., 1988), haptoglobin (Oliviero et al., 1987), serum amyloid A2, C/EBP alpha, IL-1, IL-6 (Poli and Cortese, 1989), Complement C3 (Wilson et al., 1990), IL-8, alpha-1 acid glycoprotein (Prowse and Baumann, 1988), alpha-1 antitypsin, lipoprotein lipase (Zechner et al., 1988), angiotensinogen (Ron et al., 1991), fibrinogen, c-jun (inducible by phorbol esters, TNF alpha, UV radiation, retinoic acid, and hydrogen peroxide), collagenase (induced by phorbol esters and retinoic acid), metallothionein (heavy metal and glucocorticoid inducible), Stromelysin (inducible by phorbol ester, interleukin-1 and EGF), alpha-2 macroglobulin and alpha-I antichymotrypsin.

[1014] It is envisioned that cell cycle regulatable promoters may be useful in the present invention. For example, in a bi-cistronic gene therapy vector, use of a strong CMV promoter to drive expression of a first gene such as p16 that arrests cells in the G1 phase could be followed by expression of a second gene such as p53 under the control of a promoter that is active in the G1 phase of the cell cycle, thus providing a “second hit” that would push the cell into apoptosis. Other promoters such as those of various cyclins, PCNA, galectin-3, E2FI, p53 and BRCAI could be used.

[1015] Tumor specific promoters such as osteocalcin, hypoxia-responsive element (HRE), NIAGE-4, CEA, alpha-fetoprotein, GRP78/BiP and tyrosinase also may be used to regulate gene expression in tumor cells. Other promoters that could be used according to the present invention include Lac-regulatable, chemotherapy inducible (e.g. MDR), and heat (hyperthermia) inducible promoters, Radiation-inducible (e.g., EGR (Joki et al., 1995)), Alpha-inhibin, RNA pol III tRNA met and other amino acid promoters, U1 snRNA (Bartlett et al., 1996), MC-1, PGK, -actin and alpha-globin. Many other promoters that may be useful are listed in Walther and Stein (1996), the disclosure of which is incorporated herein by reference.

[1016] It is envisioned that any of the above promoters alone or in combination with another may be useful according to the present invention depending on the action desired.

[1017] In addition, this list of promoters should not be considered to be exhaustive or limiting, those of skill in the art will know of other promoters that may be used in conjunction with the THAP-family and THAP domain nucleic acids and methods disclosed herein.

[1018] Enhancers

[1019] Enhancers are genetic elements that increase transcription from a promoter located at a distant position on the same molecule of DNA. Enhancers are organized much like promoters. That is, they are composed of many individual elements, each of which binds to one or more transcriptional proteins. The basic distinction between enhancers and promoters is operational. An enhancer region as a whole must be able to stimulate transcription at a distance; this need not be true of a promoter region or its component elements. On the other hand, a promoter must have one or more elements that direct initiation of RNA synthesis at a particular site and in a particular orientation, whereas enhancers lack these specificities. Promoters and enhancers are often overlapping and contiguous, often seeming to have a very similar modular organization.

[1020] Below is a list of promoters additional to the tissue specific promoters listed above, cellular promoters/enhancers and inducible promoters/enhancers that could be used in combination with the nucleic acid encoding a gene of interest in an expression construct (list of enhancers, and Table 1). Additionally, any promoter/enhancer combination (as per the Eukaryotic Promoter Data Base EPDB) could also be used to drive expression of the gene. Eukaryotic cells can support cytoplasmic transcription from certain bacterial promoters if the appropriate bacterial polymerase is provided, either as part of the delivery complex or as an additional genetic expression construct.

[1021] Suitable enhancers include: Immunoglobulin Heavy Chain; Immunoglobulin Light Chain; T-Cell Receptor; HLA DQ (x and DQ beta; beta-Interferon; Interleukin-2; Interleukin-2 Receptor; MHC Class II 5; MHC Class II HLA-DRalpha; beta-Actin; Muscle Creatine Kinase; Prealbumin (Transthyretin); Elastase I; Metallothionein; Collagenase; Albumin Gene; alpha-Fetoprotein; -Globin; beta-Globin; e-fos; c-HA-ras; Insulin; Neural Cell Adhesion Molecule (NCAM); alpha a1-Antitrypsin; H2B (TH2B) Histone; Mouse or Type I Collagen; Glucose-Regulated Proteins (GRP94 and GRP78); Rat Growth Hormone; Human Serum Amyloid A (SAA); Troponin I (TN 1); Platelet-Derived Growth Factor; Duchenne Muscular Dystrophy; SV40; Polyoma; Retroviruses; THAPilloma Virus; Hepatitis B Virus; Human Immunodeficiency Virus; Cytomegalovirus; and Gibbon Ape Leukemia Virus.

TABLE 1

| Element | Inducer |
|---|---|
| MT 11 | Phorbol Ester (TPA) |
| Heavy metals MMTV (mouse | |
| mammary tumor Glucocorticoids | |
| virus) | |
| B-Interferon | poly(rI)X; poly(rc) |
| Adenovirus 5 E2 | Ela |
| c-jun | Phorbol Ester (TPA), H2O2 |
| H202 Collagenase | Phorbol Ester (TPA) |
| Stromelysin | Phorbol Ester (TPA), IL-1 |
| SV40 | Phorbol Ester (TPA) |
| Murine MX Gene | Interferon, Newcastle Disease Virus |
| GRP78 Gene | A23187 |
| oc-2-Macroglobulin | IL-6 |
| Vimentin Serum NMC Class I | Interferon |
| Gene H-2 kB | |
| HSP70 | Ela, SV40 Large T Antigen |
| Insulin E Box | Glucose |
| Proliferin | Phorbol Ester-TPA |
| Tumor Necrosis Factor | FMA |
| Thyroid Stimulating Hormone | Thyroid Hormone |
| alpha Gene | |

[1022] In preferred embodiments of the invention, the expression construct comprises a virus or engineered construct derived from a viral genome. The ability of certain viruses to enter cells via receptor-mediated endocytosis and to integrate into host cell genome and express viral genes stably and efficiently have made them attractive candidates for the transfer of foreign genes into mammalian cells (Ridgeway, 1988; Nicolas and Rubenstein, 1988; Baichwal and Sugden, 1986; Temin, 1986, the disclosures of which are incorporated herein by reference). The first viruses used as gene vectors were DNA viruses including the papovaviruses (simian virus 40, bovine papilloma virus, and polyoma) (Ridgeway, 1988; Baichwal and Sugden, 1986) and adenoviruses (Ridgeway, 1988; Baichwal and Sugden, 1986). These have a relatively low capacity for foreign DNA sequences and have a restricted host spectrum.

[1023] Furthermore, their oncogenic potential and cytopathic effects in permissive cells raise safety concerns. They can accommodate only up to 8 kB of foreign genetic material but can be readily introduced in a variety of cell lines and laboratory animals (Nicolas and Rubenstein, 1988; Temin, 1986).

[1024] Polyadenylation Signals

[1025] Where a cDNA insert is employed, one will typically desire to include a polyadenylation signal to effect proper polyadenylation of the gene transcript. The nature of the polyadenylation signal is not believed to be crucial to the successful practice of the invention, and any such sequence may be employed such as human or bovine growth hormone and SV40 polyadenylation signals. Also contemplated as an element of the expression cassette is a terminator. These elements can serve to enhance message levels and to minimize read through from the cassette into other sequences.

[1026] Antisense Constructs

[1027] The term “antisense nucleic acid” is intended to refer to the oligonucleotides complementary to the base sequences of DNA and RNA. Antisense oligonucleotides, when introduced into a target cell, specifically bind to their target nucleic acid and interfere with transcription, RNA processing, transport and/or translation. Targeting double-stranded (ds) DNA with oligonucleotide leads to triple-helix formation; targeting RNA will lead to double-helix formation.

[1028] Antisense constructs may be designed to bind to the promoter and other control regions, exons, introns or even exon-intron boundaries of a gene. Antisense RNA constructs, or DNA encoding such antisense RNAs, may be employed to inhibit gene transcription or translation or both within a host cell, either in vitro or in vivo, such as within a host animal, including a human subject. Nucleic acid sequences comprising complementary nucleotides” are those which are capable of base-pairing according to the standard Watson-Crick complementary rules. That is, that the larger purines will base pair with the smaller pyrimidines to form only combinations of guanine paired with cytosine (G:C) and adenine paired with either thymine (A:T), in the case of DNA, or adenine paired with uracil (A:U) in the case of RNA.

[1029] As used herein, the terms “complementary” or “antisense sequences” mean nucleic acid sequences that are substantially complementary over their entire length and have very few base mismatches. For example, micleic acid sequences of fifteen bases in length may be termed complementary when they have a complementary nucleotide at thirteen or fourteen positions with only single or double mismatches. Naturally, nucleic acid sequences which are “completely complementary” will be nucleic acid sequences which are entirely complementary throughout their entire length and have no base mismatches.

[1030] While all or part of the gene sequence may be employed in the context of antisense construction, statistically, any sequence 17 bases long should occur only once in the human genome and, therefore, suffice to specify a unique target sequence.

[1031] Although shorter oligomers are easier to make and increase in vivo accessibility, numerous other factors are involved in determining the specificity of hybridization. Both binding affinity and sequence specificity of an oligonucleotide to its complementary target increases with increasing length. It is contemplated that oligonucleotides of 8, 9, 10, 11, 12, 13, 14, 15, 16, 17, 18, 19, 20 or more base pairs will be used. One can readily determine whether a given antisense nucleic acid is effective at targeting of the corresponding host cell gene simply by testing the constructs in vitro to determine whether the endogenous gene's function is affected or whether the expression of related genes having complementary sequences is affected.

[1032] In certain embodiments, one may wish to employ antisense constructs which include other elements, for example, those which include C-5 propyne pyrimidines.

[1033] Oligonucleotides which contain C-5 propyne analogues of uridine and cytidine have been shown to bind RNA with high affinity and to be potent antisense inhibitors of gene expression (Wagner et al, 1993).

[1034] Ribozyme Constructs

[1035] As an alternative to targeted antisense delivery, targeted ribozymes may be used. The term “ribozyme” refers to an RNA-based enzyme capable of targeting and cleaving particular base sequences in oncogene DNA and RNA. Ribozymes either can be targeted directly to cells, in the form of RNA oligo-nucleotides incorporating ribozyme sequences, or introduced into the cell as an expression construct encoding the desired ribozymal RNA. Ribozymes may be used and applied in much the same way as described for antisense nucleic acids.

[1036] Methods of Gene Transfer

[1037] In order to mediate the effect of transgene expression in a cell, it will be necessary to transfer the therapeutic expression constructs of the present invention into a cell. This section provides a discussion of methods and compositions of viral production and viral gene transfer, as well as non-viral gene transfer methods.

[1038] (i) Viral Vector-Mediated Transfer

[1039] The THAP-family gene is incorporated into a viral infectious particle to mediate gene transfer to a cell. Additional expression constructs encoding other therapeutic agents as described herein may also be transferred via viral transduction using infectious viral particles, for example, by transformation with an adenovirus vector of the present invention as described herein below. Alternatively, retroviral or bovine papilloma virus may be employed, both of which permit permanent transformation of a host cell with a gene(s) of interest. Thus, in one example, viral infection of cells is used in order to deliver therapeutically significant genes to a cell. Typically, the virus simply will be exposed to the appropriate host cell under physiologic conditions, permitting uptake of the virus. Though adenovirus is exemplified, the present methods may be advantageously employed with other viral or non-viral vectors, as discussed below.

[1040] Adenovirus

[1041] Adenovirus is particularly suitable for use as a gene transfer vector because of its mid-sized DNA genome, ease of manipulation, high titer, wide target-cell range, and high infectivity. The roughly 36 kB viral genome is bounded by 100-200 base pair (bp) inverted terminal repeats (ITR), in which are contained cis acting elements necessary for viral DNA replication and packaging. The early (E) and late (L) regions of the genome that contain different transcription units are divided by the onset of viral DNA replication.

[1042] The E1 region (EIA and EIB) encodes proteins responsible for the regulation of transcription of the viral genome and a few cellular genes. The expression of the E2 region (E2A and E2B) results in the synthesis of the proteins for viral DNA replication.

[1043] These proteins are involved in DNA replication, late gene expression, and host cell shut off (Renan, 1990). The products of the late genes (L1, L2, U, L4 and L5), including the majority of the viral capsid proteins, are expressed only after significant processing of a single primary transcript issued by the major late promoter (MLP). The MLP (located at 16.8 map units) is particularly efficient during the late phase of infection, and all the mRNAs issued from this promoter possess a 5′ tripartite leader (TL) sequence which makes them preferred mRNAs for translation.

[1044] In order for adenovirus to be optimized for gene therapy, it is necessary to maximize the carrying capacity so that large segments of DNA can be included. It also is very desirable to reduce the toxicity and immunologic reaction associated with certain adenoviral products. The two goals are, to an extent, coterminous in that elimination of adenoviral genes serves both ends. By practice of the present invention, it is possible achieve both these goals while retaining the ability to manipulate the therapeutic constructs with relative case.

[1045] The large displacement of DNA is possible because the cis elements required for viral DNA replication all are localized in the inverted terminal repeats (ITR) (100-200 bp) at either end of the linear viral genome. Plasmids containing ITR's can replicate in the presence of a non-defective adenovirus (Hay et al., 1984). Therefore, inclusion of these elements in an adenoviral vector should permit replication.

[1046] In addition, the packaging signal for viral encapsidation is localized between 194 385 bp (0.5-1.1 map units) at the left end of the viral genome (Hearing et al., 1987). This signal mimics the protein recognition site in bacteriophage k DNA where a specific sequence close to the left end, but outside the cohesive end sequence, mediates the binding to proteins that are required for insertion of the DNA into the head structure. El substitution vectors of Ad have demonstrated that a 450 bp (0-1.25 map units) fragment at the left end of the viral genome could direct packaging in 293 cells (Levrero et al., 1991).

[1047] Previously, it has been shown that certain regions of the adenoviral genome can be incorporated into the genome of mammalian cells and the genes encoded thereby expressed. These cell lines are capable of supporting the replication of an adenoviral vector that is deficient in the adenoviral function encoded by the cell line. There also have been reports of complementation of replication deficient adenoviral vectors by “helping” vectors, e.g., wild-type virus or conditionally defective mutants.

[1048] Replication-deficient adenoviral vectors can be complemented, in trans, by helper virus. This observation alone does not permit isolation of the replication-deficient vectors, however, since the presence of helper virus, needed to provide replicative functions, would contaminate any preparation. Thus, an additional element was needed that would add specificity to the replication and/or packaging of the replication-deficient vector. That element, as provided for in the present invention, derives from the packaging function of adenovirus.

[1049] It has been shown that a packaging signal for adenovirus exists in the left end of the conventional adenovirus map (Tibbetts, 1977). Later studies showed that a mutant with a deletion in the EIA (194-358 bp) region of the genome grew poorly even in a cell line that complemented the early (EIA) function (Hearing and Shenk, 1983). When a compensating adenoviral DNA (0-353 bp) was recombined into the right end of the mutant, the virus was packaged normally. Further mutational analysis identified a short, repeated, position-dependent element in the left end of the Ad5 genome. One copy of the repeat was found to be sufficient for efficient packaging if present at either end of the genome, but not when moved towards the interior of the Ad5 DNA molecule (Hearing et al., 1987).

[1050] By using mutated versions of the packaging signal, it is possible to create helper viruses that are packaged with varying efficiencies. Typically, the mutations are point mutations or deletions. When helper viruses with low efficiency packaging are grown in helper cells, the virus is packaged, albeit at reduced rates compared to wild-type virus, thereby permitting propagation of the helper. When these helper viruses are grown in cells along with virus that contains wild-type packaging signals, however, the wild-type packaging signals are recognized preferentially over the mutated versions. Given a limiting amount of packaging factor, the virus containing the wild-type signals are packaged selectively when compared to the helpers. If the preference is great enough, stocks approaching homogeneity should be achieved.

[1051] Retrovirus

[1052] The retroviruses are a group of single-stranded RNA viruses characterized by an ability to convert their RNA to double-stranded DNA in infected cells by a process of reverse-transcription (Coffin, 1990). The resulting DNA then stably integrates into cellular chromosomes as a provirus and directs synthesis of viral proteins.

[1053] The integration results in the retention of the viral gene sequences in the recipient cell and its descendants. The retroviral genome contains three genes - gag, pol and env—that code for capsid proteins, polymerase enzyme, and envelope components, respectively. A sequence found upstream from the gag gene, termed T, functions as a signal for packaging of the genome into virions. Two long terminal repeat (LTR) sequences are present at the 5′ and 3′ ends of the viral genome. These contain strong promoter and enhancer sequences and also are required for integration in the host cell genome (Coffin, 1990).

[1054] In order to construct a retroviral vector, a nucleic acid encoding a promoter is inserted into the viral genome in the place of certain viral sequences to produce a virus that is replication-defective. In order to produce virions, a packaging cell line containing the gag, pol and env genes but without the LTR and T components is constructed (Mann et al., 1983). When a recombinant plasmid containing a human cDNA, together with the retroviral LTR and T sequences is introduced into this cell line (by calcium phosphate precipitation for example), the T sequence allows the RNA transcript of the recombinant plasmid to be packaged into viral particles, which are then secreted into the culture media (Nicolas and Rubenstein, 1988; Temin, 1986; Mann et al., 1983, the disclosures of which are incorporated herein by reference). The media containing the recombinant retroviruses is collected, optionally concentrated, and used for gene transfer. Retroviral vectors are able to infect a broad variety of cell types. However, integration and stable expression of many types of retroviruses require the division of host cells (Paskind et al., 1975).

[1055] An approach designed to allow specific targeting of retrovirus vectors recently was developed based on the chemical modification of a retrovirus by the chemical addition of galactose residues to the viral envelope. This modification could permit the specific infection of cells such as hepatocytes via asialoglycoprotein receptors, should this be desired.

[1056] A different approach to targeting of recombinant retroviruses was designed in which biotinylated antibodies against a retroviral envelope protein and against a specific cell receptor were used. The antibodies were coupled via the biotin components by using streptavidin (Roux et al., 1989). Using antibodies against major histocompatibility complex class I and class II antigens, the infection of a variety of human cells that bore those surface antigens was demonstrated with an ecotropic virus in vitro (Roux et al., 1989).

[1057] Adeno-associated Virus

[1058] AAV utilizes a linear, single-stranded DNA of about 4700 base pairs. Inverted terminal repeats flank the genome. Two genes are present within the genome, giving rise to a number of distinct gene products. The first, the cap gene, produces three different virion proteins (VP), designated VP-1, VP 2 and VP-3.

[1059] The second, the rep gene, encodes four non-structural proteins (NS). One or more of these rep gene products is responsible for transactivating AAV transcription.

[1060] The three promoters in AAV are designated by their location, in map units, in the genome. These are, from left to right, p5, p19 and p40. Transcription gives rise to six transcripts, two initiated at each of three promoters, with one of each pair being spliced.

[1061] The splice site, derived from map units 42-46, is the same for each transcript. The four non-structural proteins apparently are derived from the longer of the transcripts, and three virion proteins all arise from the smallest transcript.

[1062] AAV is not associated with any pathologic state in humans. Interestingly, for efficient replication, AAV requires “helping” functions from viruses such as herpes simplex virus I and II, cytomegalovirus, pseudorabies virus and, of course, adenovirus.

[1063] The best characterized of the helpers is adenovirus, and many “early” functions for this virus have been shown to assist with AAV replication. Low level expression of AAV rep proteins is believed to hold AAV structural expression in check, and helper virus infection is thought to remove this block.

[1064] The terminal repeats of the AAV vector can be obtained by restriction endonuclease digestion of AAV or a plasmid such as p201, which contains a modified AAV genome (Samulski et al, 1987), or by other methods known to the skilled artisan, including but not limited to chemical or enzymatic synthesis of the terminal repeats based upon the published sequence of AAV. The ordinarily skilled artisan can determine, by well-known methods such as deletion analysis, the minimum sequence or part of the AAV ITRs which is required to allow function, i.e., stable and site specific integration.

[1065] The ordinarily skilled artisan also can determine which minor modifications of the sequence can be tolerated while maintaining the ability of the terminal repeats to direct stable, site-specific integration.

[1066] AAV-based vectors have proven to be safe and effective vehicles for gene delivery in vitro, and these vectors are being developed and tested in pre-clinical and clinical stages for a wide range of applications in potential gene therapy, both ex vivo and in vivo (Carter and Flotte, 1996; Chattedee et al., 1995; Ferrari et al., 1996; Fisher et al., 1996; Flotte et al., 1993; Goodman et al., 1994; Kaplitt et al., 1994; 1996, Kessler et al., 1996; Koeberl et al., 1997; Mizukami et al., 1996; Xiao et al., 1996, the disclosures of which are incorporated herein by reference in their entireties).

[1067] AAV-mediated efficient gene transfer and expression in the lung has led to clinical trials for the treatment of cystic fibrosis (Carter and Flotte, 1996; Flotte et al., 1993, the disclosures of which are incorporated herein by reference). Similarly, the prospects for treatment of muscular dystrophy by AAV-mediated gene delivery of the dystrophin gene to skeletal muscle, of Parkinson's disease by tyrosine hydroxylase gene delivery to the brain, of hemophilia B by Factor IX gene delivery to the liver, and potentially of myocardial infarction by vascular endothelial growth factor gene to the heart, appear promising since AAV-mediated transgene expression in these organs has recently been shown to be highly efficient (Fisher et al., 1996; Flotte et al., 1993; Kaplitt et al., 1994; 1996; Koeberl et al., 1997; McCown et al., 1996; Ping et al., 1996; and Xiao et al., 1996, the disclosures of which are incorporated herein by reference in their entireties.).

[1068] Other Viral Vectors

[1069] Other viral vectors may be employed as expression constructs in the present invention. Vectors derived from viruses such as vaccinia virus (Ridgeway, 1988; Baichwal and Sugden, 1986; Coupar et al., 1988) and hepatitus B viruses have also been developed and are useful in the present invention. They offer several attractive features for various mammalian cells (Friedmann, 1989; Ridgeway, 1988; Baichwal and Sugden, 1986; Coupar et al., 1988; and Horwich et al., 1990, the disclosures of which are incorporated herein by reference in their entireties.).

[1070] With the recent recognition of defective hepatitis B viruses, new insight was gained into the structure-function relationship of different viral sequences. In vitro studies showed that the virus could retain the ability for helper dependent packaging and reverse transcription despite the deletion of up to 80% of its genome (Horwich et al., 1990). This suggested that large portions of the genome could be replaced with foreign genetic material. Chang et al., recently introduced the chloramphenicol acetyltransferase (CAT) gene into duck hepatitis B virus genome in the place of the polymerase, surface, and pre-surface coding sequences. It was cotransfected with wild-type virus into an avian hepatoma cell line. Culture media containing high titers of the recombinant virus were used to infect primary duckling hepatocytes. Stable CAT gene expression was detected for at least 24 days after transfection (Chang et al., 1991).

[1071] In still further embodiments of the present invention, the nucleic acids to be delivered are housed within an infective virus that has been engineered to express a specific binding ligand. The virus particle will thus bind specifically to the cognate receptors of the target cell and deliver the contents to the cell. A novel approach designed to allow specific targeting of retrovirus vectors was recently developed based on the chemical modification of a retrovirus by the chemical addition of lactose residues to the viral envelope. This modification can permit the specific infection of hepatocytes via sialoglycoprotein receptors.

[1072] Another approach to targeting of recombinant retroviruses was designed in which biotinylated antibodies against a retroviral envelope protein and against a specific cell receptor were used. The antibodies were coupled via the biotin components by using streptavidin (Roux et al., 1989). Using antibodies against major histocompatibility complex class I and class II antigens, they demonstrated the infection of a variety of human cells that bore those surface antigens with an ecotropic virus in vitro (Roux et al., 1989).

[1073] (ii) Non-viral Transfer

[1074] DNA constructs of the present invention are generally delivered to a cell. In certain situations, the nucleic acid to be transferred is non-infectious, and can be transferred using non-viral methods.

[1075] Several non-viral methods for the transfer of expression constructs into cultured mammalian cells are contemplated by the present invention. These include calcium phosphate precipitation (Graham and Van Der Eb, 1973; Chen and Okayama, 1987; Rippe et al., 1990) DEAE-dextran (Gopal, 1985), electroporation (Tur Kaspa et al., 1986; Potter et al., 1984), direct microinjection (Harland and Weintraub, 1985), DNA loaded liposomes (Nicolau and Sene, 1982; Fraley et al., 1979), cell sonication (Fechheimer et al., 1987), gene bombardment using high velocity microprojectiles (Yang et al., 1990), and receptor-mediated transfection (Wu and Wu, 1987; Wu and Wu, 1988), the disclosures of which are incorporated herein by reference in their entireties.

[1076] Once the construct has been delivered into the cell the nucleic acid encoding the therapeutic gene may be positioned and expressed at different sites. In certain embodiments, the nucleic acid encoding the therapeutic gene may be stably integrated into the genome of the cell. This integration may be in the cognate location and orientation via homologous recombination (gene replacement) or it may be integrated in a random, non-specific location (gene augmentation). In yet further embodiments, the nucleic acid may be stably maintained in the cell as a separate, episomal segment of DNA. Such nucleic acid segments or “episomes” encode sequences sufficient to permit maintenance and replication independent of or in synchronization with the host cell cycle.

[1077] How the expression construct is delivered to a cell and where in the cell the nucleic acid remains is dependent on the type of expression construct employed.

[1078] In a particular embodiment of the invention, the expression construct may be entrapped in a liposome. Liposomes are vesicular structures characterized by a phospholipid bilayer membrane and an inner aqueous medium. Multilamellar liposomes have multiple lipid layers separated by aqueous medium. They form spontaneously when phospholipids are suspended in an excess of aqueous solution. The lipid components undergo self-rearrangement before the formation of closed structures and entrap water and dissolved solutes between the lipid bilayers (Ghosh and Bachhawat, 1991). The addition of DNA to cationic liposomes causes a topological transition from liposomes to optically birefringent liquid-crystalline condensed globules (Radler et al., 1997). These DNA-lipid complexes are potential non-viral vectors for use in gene therapy.

[1079] Liposome-mediated nucleic acid delivery and expression of foreign DNA in vitro has been very successful. Using the P-lactamase gene, Wong et al. (1980) demonstrated the feasibility of liposome-mediated delivery and expression of foreign DNA in cultured chick embryo, HeLa, and hepatoma cells. Nicolau et al. (1987) accomplished successful liposome-mediated gene transfer in rats after intravenous injection. Also included are various commercial approaches involving “lipofection” technology.

[1080] In certain embodiments of the invention, the liposome may be complexed with a hemagglutinating virus (HVJ). This has been shown to facilitate fusion with the cell membrane and promote cell entry of liposome-encapsulated DNA (Kaneda et al., 1989).

[1081] In other embodiments, the liposome may be complexed or employed in conjunction with nuclear nonhistone chromosomal proteins (HMG-1) (Kato et al., 1991). In yet further embodiments, the liposome may be complexed or employed in conjunction with both HVJ and HMG-1. In that such expression constructs have been successfully employed in transfer and expression of nucleic acid in vitro and in vivo, then they are applicable for the present invention.

[1082] Other vector delivery systems which can be employed to deliver a nucleic acid encoding a therapeutic gene into cells are receptor-mediated delivery vehicles. These take advantage of the selective uptake of macromolecules by receptor mediated endocytosis in almost all eukaryotic cells. Because of the cell type specific distribution of various receptors, the delivery can be highly specific (Wu and Wu, 1993).

[1083] Receptor-mediated gene targeting vehicles generally consist of two components: a cell receptor-specific ligand and a DNA-binding agent. Several ligands have been used for receptor-mediated gene transfer. The most extensively characterized ligands are asialoorosomucoid (ASOR) (Wu and Wu, 1987) and transferring (Wagner et al., 1990).

[1084] Recently, a synthetic neoglycoprotein, which recognizes the same receptor as ASOR, has been used as a gene delivery vehicle (Ferkol et al., 1993; Perales et al., 1994) and epidermal growth factor (EGF) has also been used to deliver genes to squamous carcinoma cells (Myers, EPO 0273085).

[1085] In other embodiments, the delivery vehicle may comprise a ligand and a liposome. For example, Nicolau et al, (1987) employed lactosyl-ceramide, a galactose terminal asialganglioside, incorporated into liposomes and observed an increase in the uptake of the insulin gene by hepatocytes. Thus, it is feasible that a nucleic acid encoding a therapeutic gene also may be specifically delivered into a cell type such as prostate, epithelial or tumor cells, by any number of receptor-ligand systems with or without liposomes. For example, the human prostate-specific antigen (Watt et al, 1986) may be used as the receptor for mediated delivery of a nucleic acid in prostate tissue.

[1086] In another embodiment of the invention, the expression construct may simply consist of naked recombinant DNA or plasmids. Transfer of the construct may be performed by any of the methods mentioned above which physically or chemically permeabilize the cell membrane. This is applicable particularly for transfer in vitro, however, it may be applied for in vivo use as well. Dubensky et al, (1984) successfully injected polyomavirus DNA in the form of CaP04 precipitates into liver and spleen of adult and newborn mice demonstrating active viral replication and acute infection.

[1087] Benvenisty and Neshif (1986) also demonstrated that direct intraperitoneal injection of CaP04 precipitated plasmids results in expression of the transfected genes. It is envisioned that DNA encoding a CAM may also be transferred in a similar manner in vivo and express CAM.

[1088] Another embodiment of the invention for transferring a naked DNA expression construct into cells may involve particle bombardment. This method depends on the ability to accelerate DNA coated microprojectiles to a high velocity allowing them to pierce cell membranes and enter cells without killing them (Klein et al, 1987). Several devices for accelerating small particles have been developed. One such device relies on a high voltage discharge to generate an electrical cur-rent, which in turn provides the motive force (Yang et al, 1990). The microprojectiles used have consisted of biologically inert substances such as tungsten or gold beads.

[1089] Antibodies

[1090] Polyclonal anti-THAP-family or anti-THAP domain antibodies can be prepared as described above by immunizing a suitable subject with a THAP-family or THAP domain immunogen. The anti-THAP-family or anti-THAP domain antibody titer in the immunized subject can be monitored over time by standard techniques, such as with an enzyme linked immunosorbent assay (ELISA) using immobilized THAP-family or THAP domain protein. If desired, the antibody molecules directed against THAP-family can be isolated from the mammal (e.g., from the blood) and further purified by well known techniques, such as protein A chromatography to obtain the IgG fraction. At an appropriate time after immunization, e.g., when the anti-THAP-family antibody titers are highest, antibody-producing cells can be obtained from the subject and used to prepare monoclonal antibodies by standard techniques, such as those described in the following references, the disclosures of which are incorporated herein by reference in their entireties: the hybridoma technique originally described by Kohler and Milstein (1975) Nature 256:495-497) (see also, Brown et al. (1981) J. Immunol. 127:539-46; Brown et al. (1980) J. Biol. Chem. 255:4980-83; Yeh et al. (1976) PNAS 76:2927-31; and Yeh et al. (1982) Int. J. Cancer 29:269-75), the more recent human B cell hybridoma technique (Kozbor et al. (1983) Immunol Today 4:72), the EBV-hybridoma technique (Cole et al. (1985), Monoclonal Antibodies and Cancer Therapy, Alan R. Liss, Inc., pp. 77-96) or trioma techniques. The technology for producing monoclonal antibody hybridomas is well known (see generally R. H. Kenneth, in Monoclonal Antibodies: A New Dimension In Biological Analyses, Plenum Publishing Corp., New York, N.Y. (1980); E. A. Lemer (1981) Yale J. Biol. Med., 54:387-402; M. L. Gefter et al. (1977) Somatic Cell Genet. 3:231-36). Briefly, an immortal cell line (typically a myeloma) is fused to lymphocytes (typically splenocytes) from a mammal immunized with a THAP-family immunogen as described above, and the culture supernatants of the resulting hybridoma cells are screened to identify a hybridoma producing a monoclonal antibody that binds THAP-family.

[1091] Any of the many well known protocols used for fusing lymphocytes and immortalized cell lines can be applied for the purpose of generating an anti-THAP-family or anti-THAP domain monoclonal antibody (see, e.g., G. Galfre et al. (1977) Nature 266:55052; Gefter et al. Somatic Cell Genet., cited supra; Lemer, Yale J Biol. Med, cited supra; Kenneth, Monoclonal Antibodies, cited supra), the disclosures of which are incorporated herein by reference in their entireties. Moreover, the ordinarily skilled worker will appreciate that there are many variations of such methods which also would be useful. Typically, the immortal cell line (e.g., a myeloma cell line) is derived from the same mammalian species as the lymphocytes. For example, murine hybridomas can be made by fusing lymphocytes from a mouse immunized with an immunogenic preparation of the present invention with an immortalized mouse cell line. Preferred immortal cell lines are mouse myeloma cell lines that are sensitive to culture medium containing hypoxanthine, aminopterin and thymidine (“HAT medium”). Any of a number of myeloma cell lines can be used as a fusion partner according to standard techniques, e.g., the P3-NS1/1-Ag4-1, P3-x63-Ag8.653 or Sp2/O-Ag14 myeloma lines. These myeloma lines are available from ATCC. Typically, HAT-sensitive mouse myeloma cells are fused to mouse splenocytes using polyethylene glycol (“PEG”). Hybridoma cells resulting from the fusion are then selected using HAT medium, which kills unfused and unproductively fused myeloma cells (unfused splenocytes die after several days because they are not transformed). Hybridoma cells producing a monoclonal antibody of the invention are detected by screening the hybridoma culture supernatants for antibodies that bind a THAP-family or THAP domain protein, e.g., using a standard ELISA assay.

[1092] Alternative to preparing monoclonal antibody-secreting hybridomas, a monoclonal anti-THAP-family or anti-THAP domain antibody can be identified and isolated by screening a recombinant combinatorial immunoglobulin library (e.g., an antibody phage display library) with THAP-family or THAP domain protein to thereby isolate immunoglobulin library members that bind THAP-family or THAP domain proteins. Kits for generating and screening phage display libraries are commercially available (e.g., the Pharmacia Recombinant Phage Antibody System, Catalog No. 27-9400-01; and the Stratagene SurfZAP.™. Phage Display Kit, Catalog No. 240612), the disclosures of which are incorporated herein by reference in their entireties. Additionally, examples of methods and reagents particularly amenable for use in generating and screening antibody display library can be found in, for example, Ladner et al. U.S. Pat. No. 5,223,409; Kang et al. PCT International Publication No. WO 92/18619; Dower et al. PCT International Publication No. WO 91/17271; Winter et al. PCT International Publication WO 92/20791; Markland et al. PCT International Publication No. WO 92/15679; Breitling et al. PCT International Publication WO 93/01288; McCafferty et al. PCT International Publication No. WO 92/01047; Garrard et al. PCT International Publication No. WO 92/09690; Ladner et al. PCT International Publication No. WO 90/02809; Fuchs et al. (1991) Bio/Technology 9:1370-1372; Hay et al. (1992) Hum. Antibod. Hybridomas 3:81-85; Huse et al. (1989) Science 246:1275-1281; Griffiths et al. (1993) EMBO J 12:725-734; Hawkins et al. (1992) J. Mol. Biol. 226:889-896; Clarkson et al. (1991) Nature 352:624-628; Gram et al. (1992) PNAS 89:3576-3580; Garrad et al. (1991) Bio/Technology 9:1373-1377; Hoogenboom et al. (1991) Nuc. Acid Res. 19:4133-4137; Barbas et al. (1991) PNAS 88:7978-7982; and McCafferty et al. Nature (1990) 348:552-554, the disclosures of which are incorporated herein by reference in their entireties.

[1093] Additionally, recombinant anti-THAP-family or anti-THAP domain antibodies, such as chimeric and humanized monoclonal antibodies, comprising both human and non-human portions, which can be made using standard recombinant DNA techniques, are within the scope of the invention. Such chimeric and humanized monoclonal antibodies can be produced by recombinant DNA techniques known in the art, for example using methods described in Robinson et al. International Application No. PCT/US86/02269; Akira, et al. European Patent Application 184,187; Taniguchi, M., European Patent Application 171496; Morrison et al. European Patent Application 173,494; Neuberger et al. PCT International Publication No. WO 86/01533; Cabilly et al. U.S. Pat. No. 4,816,567; Cabilly et al. European Patent Application 125,023; Better et al. (1988) Science 240:1041-1043; Liu et al. (1987) PNAS 84:3439-3443; Liu et al. (1987) J. Immunol. 139:3521-3526; Sun et al. (1987) PNAS 84:214-218; Nishimura et al. (1987) Canc. Res. 47:999-1005; Wood et al. (1985) Nature 314:446-449; and Shaw et al. (1988) J. Natl. Cancer Inst. 80:1553-1559); Morrison, S. L. (1985) Science 229:1202-1207; Oi et al. (1986) BioTechniques 4:214; Winter U.S. Pat. No. 5,225,539; Jones et al. (1986) Nature 321:552-525; Verhoeyan et al. (1988) Science 239:1534; and Beidler et al. (1988) J. Immunol. 141:4053-4060, the disclosures of which are incorporated herein by reference in their entireties.

[1094] An anti-THAP-family of anti-THAP domain antibody (e.g., monoclonal antibody) can be used to isolate THAP-family or THAP domain protein by standard techniques, such as affinity chromatography or immunoprecipitation. For example, an anti-THAP-family antibody can facilitate the purification of natural THAP-family from cells and of recombinantly produced THAP-family expressed in host cells. Moreover, an anti-THAP-family antibody can be used to detect THAP-family protein (e.g., in a cellular lysate or cell supernatant) in order to evaluate the abundance and pattern of expression of the THAP-family protein. Anti-THAP-family antibodies can be used diagnostically to monitor protein levels in tissue as part of a clinical testing procedure, e.g., to, for example, determine the efficacy of a given treatment regimen. Detection can be facilitated by coupling (i.e., physically linking) the antibody to a detectable substance. Examples of detectable substances include various enzymes, prosthetic groups, fluorescent materials, luminescent materials, bioluminescent materials, and radioactive materials. Examples of suitable enzymes include horseradish peroxidase, alkaline phosphatase, -galactosidase, or acetylcholinesterase; examples of suitable prosthetic group complexes include streptavidin/biotin and avidin/biotin; examples of suitable fluorescent materials include umbelliferone, fluorescein, fluorescein isothiocyanate, rhodamine, dichlorotriazinylamine fluorescein, dansyl chloride or phycoerythrin; an example of a luminescent material includes luminol; examples of bioluminescent materials include luciferase, luciferin, and aequorin, and examples of suitable radioactive material include ¹²⁵I, ¹³¹I, ³⁵S or ³H.

### Drug Screening Assays

[1095] Some embodiments of the present invention provide a method (also referred to herein as a “screening assay”) for identifying modulators, i.e., candidate or test compounds or agents (e.g., preferably small molecules, but also peptides, peptidomimetics or other drugs) which bind to THAP-family or THAP domain proteins, have an inhibitory or activating effect on, for example, THAP-family expression or preferably THAP-family activity, or have an inhibitory or activating effect on, for example, the activity of an THAP-family target molecule. In some embodiments small molecules can be generated using combinatorial chemistry or can be obtained from a natural products library. Assays may be cell based, non-cell-based or in vivo assays.

[1096] Drug screening assays may be binding assays or more preferentially functional assays, as further described.

[1097] In general, any suitable activity of a THAP-family protein can be detected in a drug screening assay, including: (1) mediating apoptosis or cell proliferation when expressed or introduced into a cell, most preferably inducing or enhancing apoptosis, and/or most preferably reducing cell proliferation; (2) mediating apoptosis or cell proliferation of an endothelial cell; (3) mediating apoptosis or cell proliferation of a hyperproliferative cell; (4) mediating apoptosis or cell proliferation of a CNS cell, preferably a neuronal or glial cell; (5) an activity indicative of a biological function in an animal selected from the group consisting of mediating, for example enhancing or inhibiting, angiogenesis; mediating, preferably inhibiting, inflammation; inhibiting the metastatic potential of cancerous tissue; reducing tumor burden; increasing sensitivity of cancerous cells to chemotherapy or radiotherapy; killing a cancer cell, inhibiting the growth of a cancer cell, inducing tumor regression; and mediating, preferably inhibiting, one or more of the following conditions, T-cell auto-immune infiltrative skin diseases, chronic autoinflammatory skin diseases, such as lichen panus and psoriasis, autoimmune encephalomyelitis, multiple sclerosis, rheumatoid arthritis, autoimmune diabetes, inflammatory bowel diseases, such as Crohn's disease and ulcerative colitis, Hashimoto's thyroiditis, Sjogren's syndrome, gastric lymphomas and chronic inflammatory liver disease or (6) interaction with a THAP family target molecule or THAP domain target molecule, preferably interaction with a protein or a nucleic acid.

[1098] The invention also provides a method (also referred to herein as a “screening assay”) for identifying modulators, i.e., candidate or test compounds or agents (e.g., preferably small molecules, but also peptides, peptidomimetics or other drugs) which bind to THAP1, PAR4 or PML-NB proteins, and have an inhibitory or activating effect on PAR4 or THAP1 recruitment, binding to or association with PML-NBs or interaction of a chemokine with a THAP-family polypeptide or a cellular response to a chemokine which is mediated by a THAP-family polypeptide.

[1099] In one embodiment, the invention provides assays for screening candidate or test compounds which are target molecules of a THAP family or THAP domain polypeptide, or a biologically active fragment or homologue thereof. In another embodiment, the invention provides assays for screening candidate or test compounds which bind to or modulate the activity of a THAP family or THAP domain polypeptide, or a biologically active fragment or homologue thereof. The test compounds of the present invention can be obtained using any of the numerous approaches in combinatorial library methods known in the art, including: biological libraries; spatially addressable parallel solid phase or solution phase libraries; synthetic library methods requiring deconvolution; the ‘one-bead one-compound’ library method; and synthetic library methods using affinity chromatography selection. The biological library approach is used with peptide libraries, while the other four approaches are applicable to peptide, non-peptide oligomer or small molecule libraries of compounds (Lam, K. S. (1997) Anticancer Drug Des. 12:145, the disclosure of which is incorporated herein by reference in its entirety).

[1100] Examples of methods for the synthesis of molecular libraries can be found in the art, for example in: DeWitt et al. (1993) Proc. Natl. Acad. Sci. U.S.A. 90:6909; Erb et al. (1994) Proc. Natl. Acad. Sci. USA 91:11422; Zuckermann et al. (1994). J. Med. Chem. 37:2678; Cho et al. (1993) Science 261:1303; Carrell et al. (1994) Angew. Chem. Int. Ed. Engl. 33:2059; Carell et al. (1994) Angew. Chem. Int. Ed. Engl. 33:2061; and in Gallop et al. (1994) J. Med. Chem. 37:1233, the disclosures of which are incorporated herein by reference in their entireties.

[1101] Libraries of compounds may be presented in solution (e.g., Houghten (1992) Biotechniques 13:412-421), or on beads (Lam (1991) Nature 354:82-84), chips (Fodor (1993) Nature 364:555-556), bacteria (Ladner U.S. Pat. No. 5,223,409), spores (Ladner U.S. Pat. No. 409), plasmids (Cull et al. (1992) Proc Natl Acad Sci USA 89:1865-1869) or on phage (Scott and Smith (1990) Science 249:386-390); (Devin (1990) Science 249:404-406); (Cwirla et al. (1990) Proc. Natl. Acad. Sci. 87:6378-6382); (Felici (1991) J. Mol. Biol. 222:301-310); (Ladner supra.), the disclosures of which are incorporated herein by reference in their entireties.

[1102] Determining the ability of the test compound to inhibit or increase THAP-family polypeptide activity can also be accomplished, for example, by coupling the THAP family or THAP domain polypeptide, or a biologically active fragment or homologue thereof with a radioisotope or enzymatic label such that binding of the THAP family or THAP domain polypeptide, or a biologically active fragment or homologue thereof to its cognate target molecule can be determined by detecting the labeled THAP family or THAP domain polypeptide, or a biologically active fragment or homologue thereof in a complex. For example, compounds (e.g., THAP family or THAP domain polypeptide, or a biologically active fragment or homologue thereof) can be labeled with ¹²⁵I, ³⁵S, ¹⁴C, or ³H, either directly or indirectly, and the radioisotope detected by direct counting of radioemmission or by scintillation counting. Alternatively, compounds can be enzymatically labeled with, for example, horseradish peroxidase, alkaline phosphatase, or luciferase, and the enzymatic label detected by determination of conversion of an appropriate substrate to product. The labeled molecule is placed in contact with its cognate molecule and the extent of complex formation is measured. For example, the extent of complex formation may be measured by immunoprecipitating the complex or by performing gel electrophoresis.

[1103] It is also within the scope of this invention to determine the ability of a compound (e.g., THAP family or THAP domain polypeptide, or biologically active fragment or homologue thereof) to interact with its cognate target molecule without the labeling of any of the interactants. For example, a microphysiometer can be used to detect the interaction of a compound with its cognate target molecule without the labeling of either the compound or the target molecule. McConnell, H. M. et al. (1992) Science 257:1906-1912, the disclosure of which is incorporated herein by reference in its entirety. A microphysiometer such as a cytosensor is an analytical instrument that measures the rate at which a cell acidifies its environment using a light-addressable potentiometric sensor (LAPS). Changes in this acidification rate can be used as an indicator of the interaction between compound and cognate target molecule.

[1104] In a preferred embodiment, the assay comprises contacting a cell which expresses a THAP family or THAP domain polypeptide, or biologically active fragment or homologue thereof, with a THAP-family or THAP domain protein target molecule to form an assay mixture, contacting the assay mixture with a test compound, and determining the ability of the test compound to inhibit or increase the activity of the THAP family or THAP domain polypeptide, or biologically active fragment or homologue thereof, wherein determining the ability of the test compound to inhibit or increase the activity of the THAP family or THAP domain polypeptide, or biologically active fragment or homologue thereof, comprises determining the ability of the test compound to inhibit or increase a biological activity of the THAP-family polypeptide expressing cell.

[1105] In another embodiment, the assay comprises contacting a cell which expresses a THAP family or THAP domain polypeptide, or biologically active fragment or homologue thereof, with a test compound, and determining the ability of the test compound to inhibit or increase the activity of the THAP family or THAP domain polypeptide, or biologically active fragment or homologue thereof, wherein determining the ability of the test compound to inhibit or increase the activity of the THAP family or THAP domain polypeptide, or biologically active fragment or homologue thereof, comprises determining the ability of the test compound to inhibit or increase a biological activity of the THAP-family polypeptide expressing cell.

[1106] In another preferred embodiment, the assay comprises contacting a cell which is responsive to a THAP family or THAP domain polypeptide, or a biologically active fragment or homologue thereof, with a THAP-family protein or biologically-active portion thereof, to form an assay mixture, contacting the assay mixture with a test compound, and determining the ability of the test compound to modulate the activity of the THAP-family protein or biologically active portion thereof, wherein determining the ability of the test compound to modulate the activity of the THAP-family protein or biologically active portion thereof comprises determining the ability of the test compound to modulate a biological activity of the THAP-family polypeptide-responsive cell (e.g., determining the ability of the test compound to modulate a THAP-family polypeptide activity.

[1107] In another embodiment, an assay is a cell-based assay comprising contacting a cell expressing a THAP-family target molecule (i.e. a molecule with which THAP-family polypeptide interacts) with a test compound and determining the ability of the test compound to modulate (e.g. stimulate or inhibit) the activity of the THAP-family target molecule. Determining the ability of the test compound to modulate the activity of a THAP-family target molecule can be accomplished, for example, by determining the ability of the THAP family or THAP domain polypeptide, or a biologically active fragment or homologue thereof to bind to or interact with the THAP-family target molecule.

[1108] Determining the ability of the THAP family or THAP domain polypeptide, or a biologically active fragment or homologue thereof to bind to or interact with a THAP-family target molecule can be accomplished by one of the methods described above for determining direct binding. In a preferred embodiment, determining the ability of the THAP family or THAP domain polypeptide, or a biologically active fragment or homologue thereof to bind to or interact with a THAP-family target molecule can be accomplished by determining the activity of the target molecule. For example, the activity of the target molecule can be determined by contacting the target molecule with the THAP family or THAP domain polypeptide, or a biologically active fragment or homologue thereof and measuring induction of a cellular second messenger of the target (i.e. intracellular Ca²+, diacylglycerol, IP₃, etc.), detecting catalytic/enzymatic activity of the target an appropriate substrate, detecting the induction of a reporter gene (comprising a target-responsive regulatory element operatively linked to a nucleic acid encoding a detectable marker, e.g., luciferase), or detecting a target-regulated cellular response, for example, signal transduction or protein:protein interactions.

[1109] In yet another embodiment, an assay of the present invention is a cell-free assay in which a THAP family or THAP domain polypeptide, or a biologically active fragment or homologue thereof is contacted with a test compound and the ability of the test compound to bind to the THAP family or THAP domain polypeptide, or a biologically active fragment or homologue thereof is determined. Binding of the test compound to the THAP family or THAP domain polypeptide, or a biologically active fragment or homologue thereof can be determined either directly or indirectly as described above. In a preferred embodiment, the assay includes contacting the THAP family or THAP domain polypeptide, or a biologically active fragment or homologue thereof with a known compound which binds THAP-family polypeptide (e.g., a THAP-family target molecule) to form an assay mixture, contacting the assay mixture with a test compound, and determining the ability of the test compound to interact with a THAP family or THAP domain polypeptide, or a biologically active fragment or homologue thereof, wherein determining the ability of the test compound to interact with a THAP-family protein comprises determining the ability of the test compound to preferentially bind to THAP family or THAP domain polypeptide, or a biologically active fragment or homologue thereof as compared to the known compound.

[1110] In another embodiment, the assay is a cell-free assay in which a THAP family or THAP domain polypeptide, or a biologically active fragment or homologue thereof is contacted with a test compound and the ability of the test compound to modulate (e.g., stimulate or inhibit) the activity of the THAP family or THAP domain polypeptide, or a biologically active fragment or homologue thereof is determined. Determining the ability of the test compound to modulate the activity of a THAP-family protein can be accomplished, for example, by determining the ability of the THAP family or THAP domain polypeptide, or a biologically active fragment or homologue thereof to bind to a THAP-family target molecule by one of the methods described above for determining direct binding. Determining the ability of the THAP family or THAP domain polypeptide, or a biologically active fragment or homologue thereof to bind to a THAP-family target molecule can also be accomplished using a technology such as real-time Biomolecular Interaction Analysis (BIA). Sjolander, S. and Urbaniczky, C. (1991) Anal. Chem. 63:2338-2345 and Szabo et al. (1995) Curr. Opin. Struct. Biol. 5:699-705, the disclosures of which are incorporated herein by reference in their entireties. As used herein, “BIA” is a technology for studying biospecific interactions in real time, without labeling any of the interactants (e.g., BIAcore). Changes in the optical phenomenon of surface plasmon resonance (SPR) can be used as an indication of real-time reactions between biological molecules.

[1111] In an alternative embodiment, determining the ability of the test compound to modulate the activity of a THAP family or THAP domain polypeptide, or a biologically active fragment or homologue thereof can be accomplished by determining the ability of the THAP family or THAP domain polypeptide, or a biologically active fragment or homologue thereof to further modulate the activity of a downstream effector (e.g., a growth factor mediated signal transduction pathway component) of a THAP-family target molecule. For example, the activity of the effector molecule on an appropriate target can be determined or the binding of the effector to an appropriate target can be determined as previously described.

[1112] In yet another embodiment, the cell-free assay involves contacting a THAP family or THAP domain polypeptide, or a biologically active fragment or homologue thereof with a known compound which binds the THAP-family protein to form an assay mixture, contacting the assay mixture with a test compound, and determining the ability of the test compound to interact with the THAP-family protein, wherein determining the ability of the test compound to interact with the THAP-family protein comprises determining the ability of the THAP family or THAP domain polypeptide, or a biologically active fragment or homologue thereof to preferentially bind to or modulate the activity of a THAP-family target molecule.

[1113] The cell-free assays of the present invention are amenable to use of both soluble and/or membrane-bound forms of isolated proteins (e.g. THAP family or THAP domain polypeptide, or a biologically active fragment or homologue thereof or molecules to which THAP-family targets bind). In the case of cell-free assays in which a membrane-bound form an isolated protein is used it may be desirable to utilize a solubilizing agent such that the membrane-bound form of the isolated protein is maintained in solution. Examples of such solubilizing agents include non-ionic detergents such as n-octylglucoside, n-dodecylglucoside, n-dodecylmaltoside, octanoyl-N-methylglucamide, decanoyl-N-methylglucamide, Triton.[RTM. X-100, Triton.RTM. X-114, Thesit.RTM.], Isotridecypoly(ethylene glycol ether)ₙ, 3-[(3-cholamidopropyl)dimethylamminio]-1-propane sulfonate (CHAPS), 3-[(3-cholamidopropyl)dimethylamminio]-2-hydroxy-1-propane sulfonate (CHAPPSO), or N-dodecyl═N,N-dimethyl-3-ammonio-1-propane sulfonate.

[1114] In more than one embodiment of the above assay methods of the present invention, it may be desirable to immobilize either THAP family or THAP domain polypeptide, or a biologically active fragment or homologue thereof or a target molecule thereof to facilitate separation of complexed from uncomplexed forms of one or both of the proteins, as well as to accommodate automation of the assay. Binding of a test compound to a THAP family or THAP domain polypeptide, or a biologically active fragment or homologue thereof, or interaction of a THAP-family protein with a target molecule in the presence and absence of a candidate compound, can be accomplished in any vessel suitable for containing the reactants. Examples of such vessels include microtitre plates, test tubes, and micro-centrifuge tubes. In one embodiment, a fusion protein can be provided which adds a domain that allows one or both of the proteins to be bound to a matrix. For example, glutathione-S-transferase/THAP-family fusion proteins or glutathione-S-transferase/target fusion proteins can be adsorbed onto glutathione sepharose beads (Sigma Chemical, St. Louis, Mo.) or glutathione derivatized microtitre plates, which are then combined with the test compound or the test compound and either the non-adsorbed target protein or THAP-family protein, and the mixture incubated under conditions conducive to complex formation (e.g., at physiological conditions for salt and pH). Following incubation, the beads or microtitre plate wells are washed to remove any unbound components, the matrix immobilized in the case of beads, complex determined either directly or indirectly, for example, as described above. Alternatively, the complexes can be dissociated from the matrix, and the level of THAP-family polypeptide binding or activity determined using standard techniques.

[1115] Other techniques for immobilizing proteins on matrices can also be used in the screening assays of the invention. For example, either a THAP-family protein or a THAP-family target molecule can be immobilized utilizing conjugation of biotin and streptavidin. Biotinylated THAP-family protein or target molecules can be prepared from biotin-NHS (N-hydroxy-succinimide) using techniques well known in the art (e.g., biotinylation kit, Pierce Chemicals, Rockford, Ill.), and immobilized in the wells of streptavidin-coated 96 well plates (Pierce Chemical). Alternatively, antibodies reactive with a THAP-family protein or target molecule but which do not interfere with binding of the THAP-family protein to its target molecule can be derivatized to the wells of the plate, and unbound target or THAP-family protein trapped in the wells by antibody conjugation. Methods for detecting such complexes, in addition to those described above for the GST-immobilized complexes, include immunodetection of complexes using antibodies reactive with the THAP-family protein or target molecule, as well as enzyme-linked assays which rely on detecting an enzymatic activity associated with the THAP-family protein or target molecule.

[1116] In another embodiment, modulators of THAP-family or THAP domain polypeptides expression are identified in a method wherein a cell is contacted with a candidate compound and the expression of THAP-family or THAP domain polypeptides mRNA or protein in the cell is determined. The level of expression of THAP-family polypeptide mRNA or protein in the presence of the candidate compound is compared to the level of expression of THAP-family polypeptide or THAP domain mRNA or protein in the absence of the candidate compound. The candidate compound can then be identified as a modulator of THAP-family polypeptide expression based on this comparison. For example, when expression of THAP-family polypeptide or THAP domain mRNA or protein is greater (statistically significantly greater) in the presence of the candidate compound than in its absence, the candidate compound is identified as a stimulator of THAP-family polypeptide or THAP domain mRNA or protein expression. Alternatively, when expression of THAP-family polypeptide or THAP domain mRNA or protein is less (statistically significantly less) in the presence of the candidate compound than in its absence, the candidate compound is identified as an inhibitor of THAP-family polypeptide or THAP domain mRNA or protein expression. The level of THAP-family polypeptide or THAP domain mRNA or protein expression in the cells can be determined by methods described herein for detecting THAP-family polypeptide or THAP domain mRNA or protein.

[1117] In yet another aspect of the invention, the THAP family or THAP domain polypeptide, or a biologically active fragment or homologue thereof can be used as “bait proteins” in a two-hybrid assay or three-hybrid assay using the methods described above for use in THAP-family polypeptide/PAR4 interactions assays, to identify other proteins which bind to or interact with THAP-family polypeptide (“THAP-family-binding proteins” or “THAP-family-bp”) and are involved in THAP-family polypeptide activity. Such THAP-family- or THAP domain-binding proteins are also likely to be involved in the propagation of signals by the THAP-family or THAP domain proteins or THAP-family or THAP domain proteins targets as, for example, downstream elements of a THAP-family polypeptide- or THAP domain-mediated signaling pathway. Alternatively, such THAP-family-binding proteins are likely to be THAP-family polypeptides inhibitors.

[1118] THAP/DNA Binding Assays

[1119] In another embodiment of the invention a method is provided for identifying compounds which interfere with THAP-family DNA binding activity, comprising the steps of: contacting a THAP-family protein or a portion thereof immobilized on a solid support with both a test compound and DNA fragments, or contacting a DNA fragment immobilized on a solid support with both a test compound and a THAP-family protein. The binding between DNA and the THAP-protein or a portion thereof is detected, wherein a decrease in DNA binding when compared to DNA binding in the absence of the test compound indicates that the test compound is an inhibitor of THAP-family DNA binding activity, and an increase in DNA binding when compared to DNA binding in the absence of the test compound indicates that the test compound is an inducer of or restores THAP-family DNA binding activity. As discussed further, DNA fragments may be selected to be specific THAP-family protein target DNA obtained for example as described in Example 28, or may be non-specific THAP-family target DNA. Methods for detecting protein-DNA interactios are well known in the art, including most commonly used electrophoretic mobility shift assays (EMSAs) or by filter binding (Zabel et al, (1991) J. Biol. Chem., 266:252; and Okamoto and Beach, (1994) Embo J. 13: 4816). Other assays are available which are amenable for high throughput detection and quantification of specific and nonspecific DNA binding (Amersham, N.J.; and Gal S. et al, ₆th Ann. Conf. Soc. Biomol. Screening, 6-9 Sep. 2000, Vancouver, B.C.).

[1120] In a first aspect, a screening assay involves identifying compounds which interfere with THAP-family DNA binding activity without prior knowledge about specific THAP-family binding sequences. For example, a THAP-family protein is contacted with both a test compound and a library of oligonucleotides or a sample of DNA fragments not selected based on specific DNA sequences. Preferably the THAP-family protein is immobilized on a solid support (such as an array or a column). Unbound DNA is separated from DNA which is bound to the THAP-family protein, and the DNA which is bound to THAP-family protein is detected and can be quantitated by any means known in the art. For example, the DNA fragment is labelled with a detectable moiety, such as a radioactive moiety, a colorimetric moiety or a fluorescent moiety. Techniques for so labelling DNA are well known in the art.

[1121] The DNA which is bound to the THAP-family protein or a portion thereof is separated from unbound DNA by immunoprecipitation with antibodies which are specific for the THAP-family protein or a portion thereof. Use of two different monoclonal anti-THAP-family antibodies may result in more complete immunoprecipitation than either one alone. The amount of DNA which is in the immunoprecipitate can be quantitated by any means known in the art. THAP-family proteins or portions thereof which bind to the DNA can also be detected by gel shift assays (Tan, Cell, 62:367, 1990), nuclease protection assays, or methylase interference assays.

[1122] It is still another object of the invention to provide methods for identifying compounds which restore the ability of mutant THAP-family proteins or portions thereof to bind to DNA sequences. In one embodiment a method of screening agents for use in therapy is provided comprising: measuring the amount of binding of a THAP-family protein or a portion thereof which is encoded by a mutant gene found in cells of a patient to DNA molecules, preferably random oligonucleotides or DNA fragments from a nucleic acid library; measuring the amount of binding of said THAP-family protein or a portion thereof to said nucleic acid molecules in the presence of a test substance; and comparing the amount of binding of the THAP-family protein or a portion thereof in the presence of said test substance to the amount of binding of the THAP-family protein in the absence of said test substance, a test substance which increases the amount of binding being a candidate for use in therapy.

[1123] In another embodiment of the invention, oligonucleotides can be isolated which restore to mutant THAP-family proteins or portions thereof the ability to bind to a consensus binding sequence or conforming sequences. Mutant THAP-family protein or a portion thereof and random oligonucleotides are added to a solid support on which THAP-family-specific DNA fragments are immobilized. Oligonucleotides which bind to the solid support are recovered and analyzed. Those whose binding to the solid support is dependent on the presence of the mutant THAP-family protein are presumptively binding the support by binding to and restoring the conformation of the mutant protein.

[1124] If desired, specific binding can be distinguished from non-specific binding by any means known in the art. For example, specific binding interactions are stronger than non-specific binding interactions. Thus the incubation mixture can be subjected to any agent or condition which destabilizes protein/DNA interactions such that the specific binding reaction is the predominant one detected. Alternatively, as taught more specifically below, a non-specific competitor, such as dI-dC, can be added to the incubation mixture. If the DNA containing the specific binding sites is labelled and the competitor is unlabeled, then the specific binding reactions will be the ones predominantly detected upon measuring labelled DNA.

[1125] According to another embodiment of the invention, after incubation of THAP-family protein or a portion thereof with specific DNA fragments all components of the cell lysate which do not bind to the DNA fragments are removed. This can be accomplished, among other ways, by employing DNA fragments which are attached to an insoluble polymeric support such as agarose, cellulose and the like. After binding, all non-binding components can be washed away, leaving THAP-family protein or a portion thereof bound to the DNA/solid support. The THAP-family protein or a portion thereof can be quantitated by any means known in the art. It can be determined using an immunological assay, such as an ELISA, RIA or Western blotting.

[1126] In another embodiment of the invention a method is provided for identifying compounds which specifically bind to THAP-family-specific-DNA sequences, comprising the steps of: contacting a THAP-family-specific DNA fragment immobilized on a solid support with both a test compound and wild-type THAP-family protein or a portion thereof to bind the wild-type THAP-family protein or a portion thereof to the DNA fragment; determining the amount of wild-type THAP-family protein which is bound to the DNA fragment, inhibition of binding of wild-type THAP-family protein by the test compound with respect to a control lacking the test compound suggesting binding of the test compound to the THAP-family-specific DNA binding sequences.

[1127] It is still another object of the invention to provide methods for identifying compounds which restore the ability of mutant THAP-family proteins or portions thereof to bind to specific DNA binding sequences. In one embodiment a method of screening agents for use in therapy is provided comprising: measuring the amount of binding of a THAP-family protein or a portion thereof which is encoded by a mutant gene found in cells of a patient to a DNA molecule which comprises more than one monomer of a specific THAP-family target nucleotide sequence; measuring the amount of binding of said THAP-family protein to said nucleic acid molecule in the presence of a test substance; and comparing the amount of binding of the THAP-family protein in the presence of said test substance to the amount of binding of the THAP-family protein or a portion thereof in the absence of said test substance, a test substance which increases the amount of binding being a candidate for use in therapy.

[1128] In another embodiment of the invention a method is provided for screening agents for use in therapy comprising: contacting a transfected cell with a test substance, said transfected cell containing a THAP-family protein or a portion thereof which is encoded by a mutant gene found in cells of a patient and a reporter gene construct comprising a reporter gene which encodes an assayable product and a sequence which conforms to a THAP-family DNA binding site, wherein said sequence is upstream from and adjacent to said reporter gene; and determining whether the amount of expression of said reporter gene is altered by the test substance, a test substance which alters the amount of expression of said reporter gene being a candidate for use in therapy.

[1129] In still another embodiment a method of screening agents for use in therapy is provided comprising: adding RNA polymerase ribonucleotides and a THAP-family protein or a portion thereof to a transcription construct, said transcription construct comprising a reporter gene which encodes an assayable product and a sequence which conforms to a THAP-family consensus binding site, said sequence being upstream from and adjacent to said reporter gene, said step of adding being effected in the presence and absence of a test substance; determining whether the amount of transcription of said reporter gene is altered by the presence of said test substance, a test substance which alters the amount of transcription of said reporter gene being a candidate for use in therapy.

[1130] According to the present invention compounds which have THAP-family activity are those which specifically complex with a THAP-family-specific DNA binding site. Oligonucleotides and oligonucleotide containing nucleotide analogs are also contemplated among those compounds which are able to complex with a THAP-family-specific DNA binding site.

[1131] Further Assays to Modulate THAP-family Polypeptide Activity in vivo

[1132] It will be appreciated that any suitable assay that allows detection of THAP-family polypeptide or THAP domain activity can be used. Examples of assays for testing protein interaction, nucleic acid binding or modulation of apoptosis in the presence or absence of a test compound are further described herein. Thus, the invention encompasses a method of identifying a candidate THAP-family polypeptide modulator (e.g. activator or inhibitor), said method comprising:

[1133] a) providing a cell comprising a THAP family or THAP domain polypeptide, or a biologically active fragment or homolog thereof;

[1134] b) contacting said cell with a test compound; and

[1135] c) determining whether said compound selectively modulates (e.g. activates or inhibits) THAP-family polypeptide activity, preferably pro-apoptotic activity, or THAP family or THAP domain target binding; wherein a determination that said compound selectively modulates (e.g. activates or inhibits) the activity of said polypeptide indicates that said compound is a candidate modulator (e.g. activator or inhibitor respectively) of said polypeptide. Preferably, the THAP family or THAP domain target is a protein or nucleic acid.

[1136] Preferably the cell is a cell which has been transfected with an recombinant expression vector encoding a THAP family or THAP domain polypeptide, or a biologically active fragment or homologue thereof.

[1137] Several examples of assays for the detection of apoptosis are described herein, in the section titled “Apoptosis assays”. Several examples of assays for the detection of THAP family or THAP domain target interactions are described herein, including assays for detection of protein interactions and nucleic acid binding.

[1138] In one example of an assay for apoptosis activity, a high throughput screening assay for molecules that abrogate or stimulate THAP-family polypeptide proapoptotic activity is provided based on serum-withdrawal induced apoptosis in a 3T3 cell line with tetracycline-regulated expression of a THAP family or THAP domain polypeptide, or a biologically active fragment or homologue thereof. Apoptotic cells can be detected by TUNEL labeling in 96- or 384-wells microplates. A drug screening assay can be carried out along the lines as described in Example 23. 3T3 cells, which have previously been used to analyze the pro-apoptotic activity of PAR4 (Diaz-Meco et al, 1996; Berra et al., 1997), can be transfected with expression vectors encoding a THAP-family or THAP domain polypeptide allowing the ectopic expression of THAP-family polypeptide. Then, the apoptotic response to serum withdrawal is assayed in the presence of a test compound, allowing the identification of test compounds that either enhance or inhibit the ability of THAP-family or THAP domain polypeptide to induce apoptosis. Transfected cells are deprived of serum and cells with apoptotic nuclei are counted. Apoptotic nuclei can be counted by DAPI staining and in situ TUNEL assays.

[1139] Further THAP-family Polypeptide/THAP-target Interaction Assays

[1140] In exemplary methods THAP/THAP target interaction assays are described in the context of THAP1 and the THAP target Par4. However, it will be appreciated that assays for screening for modulators of other THAP family members or THAP domains and other THAP target molecules may be carried out by substituting these for THAP1 and Par4 in the methods below. For example, in some embodiments, modulators which affect the interaction between a THAP-family polypeptide and SLC are identified. It will be appreciated, however, that the same assays can be used to determine the interaction between any THAP-target polypeptide (for example, a chemokine) and a THAP-family polypeptide, which comprises an interaction domain for the chemokine. THAP-family polypeptides that can be used in these assays include the polypeptides of SEQ ID NOs: 1-114, biologically active fragments thereof, THAP-family polypeptide oligomers, oligomers comprising a THAP-family chemokine-binding domain, THAP-family polypeptide-immunoglobulin fusions, THAP-family chemokine-binding domain-immunoglobulin fusions and polypeptide homologs having at least 30% amino acid identity to any one of the aforementioned polypeptides.

[1141] As demonstrated in Examples 4, 5, 6, and 7 and FIGS. 3, 4 and 5, the inventors have demonstrated using several experimental methods that THAP1 interacts with the pro-apoptotic protein Par4. In particular, it has been shown that THAP1 interacts with Par4 wild type (Par4) and a Par4 death domain (Par4DD) in a yeast two-hybrid system. Yeast cells were cotransformed with BD7-THAP1 and AD7-Par4, AD7, AD7-Par4DD or AD7-Par4A expression vectors. Transformants were selected on media lacking histidine and adenine. Identical results were obtained by cotransformation of AD7-THAP1 with BD7-Par4, BD7, BD7-Par4DD or BD7-Par4A.

[1142] The inventors have also demonstrated in vitro binding of THAP1 to GST-Par4DD. Par4DD was expressed as a GST fusion protein, purified on glutathione sepharose and employed as an affinity matrix for binding of in vitro translated ³⁵S-methionine labeled THAP1. GST served as negative control.

[1143] Furthermore, the inventors have shown that THAP1 interacts with both Par4DD and SLC in vivo. Myc-Par4DD and GFP-THAP1 expression vectors were cotransfected in primary human endothelial cells. Myc-Par4DD was stained with monoclonal anti-myc antibody. Green fluorescence, GFP-THAP1; red fluorescence, Par4DD.

[1144] The invention thus encompasses assays for the identification of molecules that modulate (stimulate or inhibit) THAP-family polypeptide/PAR4 binding. In preferred embodiments, the invention includes assays for the identification of molecules that modulate (stimulate or inhibit) THAP1/PAR4 binding or THAP1/SLC binding.

[1145] Four examples of high throughput screening assays include:

[1146] 1) a two hybrid-based assay in yeast to find drugs that disrupt interaction of the THAP-family bait with the PAR4 or SLC as prey

[1147] 2) an in vitro interaction assay using recombinant THAP-family polypeptide and PAR4 or SLC proteins

[1148] 3) a chip-based binding assay using recombinant THAP-family polypeptide and PAR4 or SLC proteins

[1149] 2) a fluorescence resonance energy transfer (FRET) cell-based assay using THAP-family polypeptide and PAR4 or SLC proteins fused with fluorescent proteins

[1150] The invention thus encompasses a method of identifying a candidate THAP-family polypeptide/PAR4 or SLC interaction modulator, said method comprising:

[1151] a) providing a THAP family or THAP domain polypeptide, or a biologically active fragment or homologue thereof and a PAR4 or SLC polypeptide or fragment thereof;

[1152] b) contacting said THAP family or THAP domain polypeptide with a test compound; and

[1153] c) determining whether said compound selectively modulates (e.g. activates or inhibits) THAP-family/PAR4 or SLC interaction activity.

[1154] Also envisioned is a method comprising:

[1155] a) providing a cell comprising a THAP family or THAP domain polypeptide, or a biologically active fragment or homologue thereof and a PAR4 or SLC polypeptide or fragment thereof;

[1156] b) contacting said cell with a test compound; and

[1157] c) determining whether said compound selectively modulates (e.g. activates or inhibits) THAP-family/PAR4 or SLC interaction activity.

[1158] In general, any suitable assay for the detection of protein-protein interaction may be used.

[1159] In one example, a THAP family or THAP domain polypeptide, or a biologically active fragment or homologue thereof can be used as a “bait protein” and a PAR4 or SLC protein can be used as a “prey protein” (or vice-versa) in a two-hybrid assay (see, e.g., U.S. Pat. No. 5,283,317; Zervos et al. (1993) Cell 72:223-232; Madura et al. (1993) J. Biol. Chem. 268:12046-12054; Bartel et al. (1993) Biotechniques 14:920-924; Iwabuchi et al. (1993) Oncogene 8:1693-1696; and Brent WO94/10300, the disclosures of which are incorporated herein by reference in their entireties). The two-hybrid system is based on the modular nature of most transcription factors, which consist of separable DNA-binding and activation domains. Briefly, the assay utilizes two different DNA constructs. In one construct, the gene that codes for a THAP family or THAP domain polypeptide, or a biologically active fragment or homologue thereof is fused to a gene encoding the DNA binding domain of a known transcription factor (e.g., GAL-4). In the other construct, the gene that codes for a THAP family or THAP domain polypeptide, or a biologically active fragment or homologue thereof (“prey” or “sample”) is fused to a gene that codes for the activation domain of the known transcription factor. If the “bait” and the “prey” proteins are able to interact, in vivo, forming a THAP-family polypeptide/PAR4 complex, the DNA-binding and activation domains of the transcription factor are brought into close proximity. This proximity allows transcription of a reporter gene (e.g., LacZ) which is operably linked to a transcriptional regulatory site responsive to the transcription factor. Expression of the reporter gene can be detected and cell colonies containing the functional transcription factor can be isolated and used to obtain the cloned gene which encodes the protein which interacts with the THAP-family protein. This assay can thus be carried out in the presence or absence of a test compound, whereby modulation of THAP-family polypeptide/PAR4 or SLC interaction can be detected by lower or lack of transcription of the reported gene.

[1160] In other examples, in vitro THAP-family polypeptide/PAR4 or SLC interaction assays can be carried out, several examples of which are further described herein. For example, a recombinant THAP family or THAP domain polypeptide, or a biologically active fragment or homologue thereof is contacted with a recombinant PAR4 or SLC protein or biologically active portion thereof, and the ability of the PAR4 or SLC protein to bind to the THAP-family protein is determined. Binding of the PAR4 or SLC protein compound to the THAP-family protein can be determined either directly or indirectly as described herein. In a preferred embodiment, the assay includes contacting the THAP family or THAP domain polypeptide, or a biologically active fragment or homologue thereof with a PAR4 or SLC protein which binds a THAP-family protein (e.g., a THAP-family target molecule) to form an assay mixture, contacting the assay mixture with a test compound, and determining the ability of the test compound to interact with a THAP-family protein, wherein determining the ability of the test compound to interact with a THAP-family protein comprises determining the ability of the test compound to preferentially bind to THAP-family or biologically active portion thereof as compared to the PAR4 or SLC protein. For example, the step of determining the ability of the test compound to interact with a THAP-family protein may comprise determining the ability of the compound to displace Par4 or SLC from a THAP-family protein/Par4 or SLC complex thereby forming a THAP-family protein/compound complex. Alternatively, it will be appreciated that it is also possible to determine the ability of the test compound to interact with a PAR4 or SLC protein, wherein determining the ability of the test compound to interact with a PAR4 or SLC protein comprises determining the ability of the test compound to preferentially bind to PAR4 or SLC or biologically active portion thereof as compared to the THAP-family protein. For example, the step of determining the ability of the test compound to interact with a THAP-family protein may comprise determining the ability of the compound to displace Par4 or SLC from a THAP-family protein/Par4 or SLC complex thereby forming a THAP-family protein/compound complex.

[1161] Assays to Modulate THAP-family Polypeptide and/or Par4 Trafficking in the PML Nuclear Bodies (PML NBs)

[1162] As demonstrated in Examples 8 and 9, the inventors have demonstrated using several experimental methods that THAP1 and Par4 localize in PML NBs.

[1163] The inventors demonstrated that THAP1 is a novel protein associated with PML-nuclear bodies. Double immunofluorescence staining showed colocalization of THAP1 with PML-NBs proteins, PML and Daxx. Primary human endothelial cells were transfected with GFP-THAP1 expression vector; endogenous PML and Daxx were stained with monoclonal anti-PML and polyclonal anti-Daxx antibodies, respectively.

[1164] The inventors also demonstrated that Par4 is a novel component of PML-NBs that colocalizes with THAP1 in vivo by several experiments. In one experiments, double immunofluorescence staining revealed colocalization of Par4 and PML at PML-NBs in primary human endothelial cells or fibroblasts. Endogenous PAR4 and PML were stained with polyclonal anti-PAR4 and monoclonal anti-PML antibodies, respectively. In another experiment, double staining revealed colocalization of Par4 and THAP1 in cells expressing ectopic GFP-THAP1. Primary human endothelial cells or fibroblasts were transfected with GFP-THAP1 expression vector; endogenous Par4 was stained with polyclonal anti-PAR4 antibodies.

[1165] The inventors further demonstrated that PML recruits the THAP1/Par4 complex to PML-NBs. Triple immunofluorescence staining showed colocalization of THAP1, Par4 and PML in cells overexpressing PML and absence of colocalization in cells expressing ectopic Sp100. Hela cells were cotransfected with GFP-THAP1 and HA-PML or HA-SP100 expression vectors; HA-PML or HA-SP100 and endogenous Par4 were stained with monoclonal anti-HA and polyclonal anti-Par4 antibodies, respectively.

[1166] Assays to Modulate THAP Family Protein Trafficking in the PML Nuclear Bodies

[1167] Provided are assays for the identification of drugs that modulate (stimulate or inhibit) THAP-family or THAP domain protein, particularly THAP1, binding to PML-NB proteins or localization to PML-NBs. In general, any suitable assay for the detection of protein-protein interaction may be used. Two examples of high throughput screening assays include 1) a two hybrid-based assay in yeast to find compounds that disrupt interaction of the THAP1 bait with the PML-NB protein prey; and 2) in vitro interaction assays using recombinant THAP1 and PML-NB proteins. Such assays may be conducted as described above with respect to THAP-family/Par4 assays except that the PML-NB protein is used in place of Par4. Binding may be detected, for example, between a THAP-family protein and a PML protein or PML associated protein such as daxx, sp100, sp140, p53, pRB, CBP, BLM or SUMO-1.

[1168] Other assays for which standard methods are well known include assays to identify molecules that modulate, generally inhibit, the colocalization of THAP1 with PML-NBs. Detection can be carried out using a suitable label, such as an anti-THAP1 antibody, and an antibody allowing the detection of PML-NB protein.

[1169] Assays to Modulate PAR4 Trafficking in the PML Bodies

[1170] Provided are assays for the identification of drugs that modulate (stimulate or inhibit) PAR4 binding to PML-NB proteins or localization to PML-NBs. In general, any suitable assay for the detection of protein-protein interaction may be used. Two examples of high throughput screening assays include 1) a two hybrid-based assay in yeast to find compounds that disrupt interaction of the PAR4 bait with the PML-NB protein prey; and 2) in vitro interaction assays using recombinant PAR4 and PML-NB proteins. Such assays may be conducted as described above with respect to THAP-family polypeptide/Par4 assays except that the PML-NB protein is used in place of the THAP-family polypeptide. Binding may be detected, for example, between a Par4 protein and a PML protein or PML associated protein such as daxx, sp100, sp140, p53, pRB, CBP, BLM or SUMO-1.

[1171] Other assays for which standard methods are well known include assays to identify molecules that modulate, generally inhibit, the colocalization of PAR4 with PML-NBs. Detection can be carried out using a suitable label, such as an anti-PAR4 antibody, and an antibody allowing the detection of PML-NB protein.

[1172] This invention further pertains to novel agents identified by the above-described screening assays and to processes for producing such agents by use of these assays. Accordingly, in one embodiment, the present invention includes a compound or agent obtainable by a method comprising the steps of any one of the aforementioned screening assays (e.g., cell-based assays or cell-free assays). For example, in one embodiment, the invention includes a compound or agent obtainable by a method comprising contacting a cell which expresses a THAP-family target molecule with a test compound and determining the ability of the test compound to bind to, or modulate the activity of, the THAP-family target molecule. In another embodiment, the invention includes a compound or agent obtainable by a method comprising contacting a cell which expresses a THAP-family target molecule with a THAP-family protein or biologically-active portion thereof, to form an assay mixture, contacting the assay mixture with a test compound, and determining the ability of the test compound to interact with, or modulate the activity of, the THAP-family target molecule. In another embodiment, the invention includes a compound or agent obtainable by a method comprising contacting a THAP-family protein or biologically active portion thereof with a test compound and determining the ability of the test compound to bind to, or modulate (e.g., stimulate or inhibit) the activity of, the THAP-family protein or biologically active portion thereof. In yet another embodiment, the present invention includes a compound or agent obtainable by a method comprising contacting a THAP-family protein or biologically active portion thereof with a known compound which binds the THAP-family protein to form an assay mixture, contacting the assay mixture with a test compound, and determining the ability of the test compound to interact with, or modulate the activity of the THAP-family protein.

[1173] Accordingly, it is within the scope of this invention to further use an agent identified as described herein in an appropriate animal model. For example, an agent identified as described herein (e.g., a THAP-family or THAP domain modulating agent, an antisense THAP-family or THAP domain nucleic acid molecule, a THAP-family- or THAP domain- specific antibody, or a THAP-family- or THAP domain-binding partner) can be used in an animal model to determine the efficacy, toxicity, or side effects of treatment with such an agent. Alternatively, an agent identified as described herein can be used in an animal model to determine the mechanism of action of such an agent. Furthermore, this invention pertains to uses of novel agents identified by the above-described screening assays for treatments as described herein.

[1174] The present invention also pertains to uses of novel agents identified by the above-described screening assays for diagnoses, prognoses, and treatments as described herein. Accordingly, it is within the scope of the present invention to use such agents in the design, formulation, synthesis, manufacture, and/or production of a drug or pharmaceutical composition for use in diagnosis, prognosis, or treatment, as described herein. For example, in one embodiment, the present invention includes a method of synthesizing or producing a drug or pharmaceutical composition by reference to the structure and/or properties of a compound obtainable by one of the above-described screening assays. For example, a drug or pharmaceutical composition can be synthesized based on the structure and/or properties of a compound obtained by a method in which a cell which expresses a THAP-family target molecule is contacted with a test compound and the ability of the test compound to bind to, or modulate the activity of, the THAP-family target molecule is determined. In another exemplary embodiment, the present invention includes a method of synthesizing or producing a drug or pharmaceutical composition based on the structure and/or properties of a compound obtainable by a method in which a THAP-family protein or biologically active portion thereof is contacted with a test compound and the ability of the test compound to bind to, or modulate (e.g., stimulate or inhibit) the activity of, the THAP-family protein or biologically active portion thereof is determined.

[1175] Apoptosis Assays

[1176] It will be appreciated that any suitable apoptosis assay may be used to assess the apoptotic activity of a THAP family or THAP domain polypeptide, or a biologically active fragment or homologue thereof.

[1177] Apoptosis can be recognized by a characteristic pattern of morphological, biochemical, and molecular changes. Cells going through apoptosis appear shrunken, and rounded; they also can be observed to become detached from culture dish. The morphological changes involve a characteristic pattern of condensation of chromatin and cytoplasm which can be readily identified by microscopy. When stained with a DNA-binding dye, e.g., H33258, apoptotic cells display classic condensed and punctate nuclei instead of homogeneous and round nuclei.

[1178] A hallmark of apoptosis is endonucleolysis, a molecular change in which nuclear DNA is initially degraded at the linker sections of nucleosomes to give rise to fragments equivalent to single and multiple nucleosomes. When these DNA fragments are subjected to gel electrophoresis, they reveal a series of DNA bands which are positioned approximately equally distant from each other on the gel. The size difference between the two bands next to each other is about the length of one nucleosome, i.e., 120 base pairs. This characteristic display of the DNA bands is called a DNA ladder and it indicates apoptosis of the cell. Apoptotic cells can be identified by flow cytometric methods based on measurement of cellular DNA content, increased sensitivity of DNA to denaturation, or altered light scattering properties. These methods are well known in the art and are within the contemplation of the invention.

[1179] Abnormal DNA breaks which are characteristic of apoptosis can be detected by any means known in the art. In one preferred embodiment, DNA breaks are labeled with biotinylated dUTP (b-dUTP). As described in U.S. Pat. No. 5,897,999, the disclosure of which is incorporated herein by reference, cells are fixed and incubated in the presence of biotinylated dUTP with either exogenous terminal transferase (terminal DNA transferase assay; TdT assay) or DNA polymerase (nick translation assay; NT assay). The biotinylated dUTP is incorporated into the chromosome at the places where abnormal DNA breaks are repaired, and are detected with fluorescein conjugated to avidin under fluorescence microscopy.

[1180] Assessing THAP-family, THAP domain and PAR4 Polypeptides Activity

[1181] For assessing the nucleic acids and polypeptides of the invention, the apoptosis indicator which is assessed in the screening method of the invention may be substantially any indicator of the viability of the cell. By way of example, the viability indicator may be selected from the group consisting of cell number, cell refractility, cell fragility, cell size, number of cellular vacuoles, a stain which distinguishes live cells from dead cells, methylene blue staining, bud size, bud location, nuclear morphology, and nuclear staining. Other viability indicators and combinations of the viability indicators described herein are known in the art and may be used in the screening method of the invention.

[1182] Cell death status can be evaluated based on DNA integrity. Assays for this determination include assaying DNA on an agarose gel to identify DNA breaking into oligonucleosome ladders and immunohistochemically detecting the nicked ends of DNA by labeling the free DNA end with fluorescein or horseradish peroxidase-conjugated UTP via terminal transferase. Routinely, one can also examine nuclear morphology by propidium iodide (PI) staining. All three assays (DNA ladder, end-labeling, and PI labelling) are gross measurements and good for those cells that are already dead or at the end stage of dying.

[1183] In a preferred example, an apoptosis assay is based on serum-withdrawal induced apoptosis in a 3T3 cell line with tetracycline-regulated expression of a THAP family or THAP domain polypeptide, or a biologically active fragment or homologue thereof. Detection of apoptotic cells is accomplished by TUNEL labeling cells in 96- or 384-well microplates. This example is further described in Example 23.

[1184] In other aspects, assays may test for the generation of cytotoxic death signals, anti-viral responses (Tartaglia et al., (1993) Cell 74(5):845-531), and/or the activation of acid sphingomyelinase (Wiegmann et al., (1994) Cell 78(6):1005-15) when the THAP-family protein is overexpressed or ectopically expressed in cells. Assaying for modulation of apoptosis can also be carried out in neuronal cells and lymphocytes for example, where factor withdrawal is known to induce cell suicide as demonstrated with neuronal cells requiring nerve growth factor to survive (Martin, D. P. et al, (1988) J. Cell Biol 106, 829-844) and lymphocytes depending on a specific lymphokine to live (Kyprianou, N. and Isaacs, J. T. (1988) Endrocrinology 122:552-562). The above disclosures are incorporated herein by reference.

[1185] THAP-family or THAP Domain Polypeptide—Marker Fusions in Cell Assays

[1186] In one method, an expression vector encoding the a THAP family or THAP domain polypeptide, or a biologically active fragment or homologue thereof can be used to evaluate the ability of the polypeptides of the invention to induce apoptosis in cells. If desired, a THAP-family or THAP domain polypeptide may be fused to a detectable marker in order to facilitate identification of those cells expressing the a THAP family or THAP domain polypeptide, or a biologically active fragment or homologue thereof. For example, a variant of the Aequoria victoria GFP variant, enhanced green fluorescent protein (EGFP), can be used in fusion protein production (CLONTECH Laboratories, Inc., 1020 East Meadow Circle, Palo Alto, Calif. 94303), further described in U.S. Pat. No. 6,191,269, the disclosure of which is incorporated herein by reference.

[1187] The THAP-family- or THAP domain polypeptide cDNA sequence is fused in-frame by insertion of the THAP-family- or THAP domain polypeptide encoding cDNA into the SalI-BamHI site of plasmid pEGFP-NI (GenBank Accession #U55762). Cells are transiently transfected by the method optimal for the cell being tested (either CaPO⁴ or Lipofectin). Expression of a THAP-family or THAP domain polypeptide and induction of apoptosis is examined using a fluorescence microscope at 24 hrs and 48 hrs post-transfection. Apoptosis can be evaluated by the TUNEL method (which involves 3′ end-labeling of cleaved nuclear and/or morphological criteria DNA) (Cohen et al. (1984) J. Immunol. 132:38-42, the disclosure of which is incorporated herein by reference). Where the screen uses a fusion polypeptide comprising a THAP-family or THAP domain polypeptide and a reporter polypeptide (e.g., EGFP), apoptosis can be evaluated by detection of nuclear localization of the reporter polypeptide in fragmented nuclear bodies or apoptotic bodies. For example, where a THAP-family or THAP domain polypeptide-EGFP fusion polypeptide is used, distribution of THAP-family or THAP domain polypeptide EGFP-associated fluorescence in apoptotic cells would be identical to the distribution of DAPI or Hoechst 33342 dyes, which are conventionally used to detect the nuclear DNA changes associated with apoptosis (Cohen et al., supra). A minimum of approximately 100 cells, which display characteristic EGFP fluorescence, are evaluated by fluorescence microscopy. Apoptosis is scored as nuclear fragmentation, marked apoptotic bodies, and cytoplasmic boiling. The characteristics of nuclear fragmentation are particularly visible when THAP-family or THAP domain polypeptide-EGFP condenses in apoptotic bodies.

[1188] The ability of the THAP-family- or THAP domain polypeptides to undergo nuclear localization and to induce apoptosis can be tested by transient expression in 293 human kidney cells. If proved susceptible to THAP-family- or THAP domain-induced apoptosis, 293 cells can serve as a convenient initial screen for those THAP family or THAP domain polypeptides, or biologically active fragments or homologues thereof that will likely also induce apoptosis in other (e.g. endothelial cells or cancer cells). In an exemplary protocol, 293 cells are transfected with plasmid vectors expressing THAP-family- or THAP domain-EGFP fusion protein. Approximately 5*10⁶ 293 cells in 100 mm dishes were transfected with 10 g of plasmid DNA using the calcium-phosphate method. The plasmids used are comprise CMV enhancer/promoter and THAP-family- or THAP domain-EGFP coding sequence). Apoptosis is evaluated 24 hrs after transfection by TUNEL and DAPI staining. The THAP-family- or THAP domain-EGFP vector transfected cells are evaluated by fluorescence microscopy with observation of typical nuclear aggregation of the EGFP marker as an indication of apoptosis. If apoptotic, the distribution of EGFP signal in cells expressing THAP-family- or THAP domain-EGFP will be identical to the distribution of DAPI or Hoechst 33342 dyes, which are conventionally used to detect the nuclear DNA changes associated with apoptosis (Cohen et al., supra).

[1189] The ability of the THAP family or THAP domain polypeptides, or biologically active fragments or homologues thereof to induce apoptosis can also be tested by expression assays in human cancer cells, for example as available from NCI. Vector type (for example plasmid or retroviral or sindbis viral) can be selected based on efficiency in a given cell type. After the period indicated, cells are evaluated for morphological signs of apoptosis, including aggregation of THAP-family- or THAP domain-EGFP into nuclear apoptotic bodies. Cells are counted under a fluorescence microscope and scored as to the presence or absence of apoptotic signs, or cells are scored by fluorescent TUNEL assay and counted in a flow cytometer. Apoptosis is expressed as a percent of cells displaying typical advanced changes of apoptosis.

[1190] Cells from the NCI panel of tumor cells include from example:

[1191] colon cancer, expression using a retroviral expression vector, with evaluation of apoptosis at 96 hrs post-infection (cell lines KM12; HT-29; SW-620; COLO205; HCT-5; HCC 2998; HCT-116);

[1192] CNS tumors, expression using a retroviral expression vector, with evaluation of apoptosis at 96 hrs post-infection (cell lines SF-268, astrocytoma; SF-539, glioblastoma; SNB-19, gliblastoma; SNB-75, astrocytoma; and U251, glioblastoma;

[1193] leukemia cells, expression using a retroviral expression vector, with evaluation of apoptosis at 96 hrs post-infection (cell lines CCRF-CEM, acute lymphocytic leukemia (ALL); K562, acute myelogenous leukemia (AML); MOLT-4, ALL; SR, immunoblastoma large cell; and RPMI 8226, Myeloblastoma);

[1194] prostate cancer, expression using a retroviral expression vector, with evaluation of apoptosis at 96 hrs post-infection (PC-3);

[1195] kidney cancer, expression using a retroviral expression vector, with evaluation of apoptosis at 96 hrs post-infection (cell lines 768-0; UO-3 1; TK10; ACHN);

[1196] skin cancer, expression using a retroviral expression vector, with evaluation of apoptosis at 96 hrs post-infection (Melanoma) (cell lines SKMEL-28; M14; SKMEL-5; MALME-3);

[1197] lung cancer, expression using a retroviral expression vector, with evaluation of apoptosis at 96 hrs post-infection (cell lines HOP-92; NCI-H460; HOP-62; NCI-H522; NCI-H23; A549; NCI-H226; EKVX; NCI-H322);

[1198] breast cancer, expression using a retroviral expression vector, with evaluation of apoptosis at 96 hrs post-infection (cell lines MCF-7; T-47D; MCF-7/ADR; MDAMB43; MDAMB23; MDA-N; BT-549);

[1199] ovary cancer, expression using either a retroviral expression vector and protocol or the Sindbis viral expression vector and protocol, with evaluation of apoptosis at 96 hrs post-infection with retrovirus or at 24 hrs post-infection with Sindbis viral vectors (cell lines OVCAR-8; OVCAR-4; IGROV-1; OVCAR-5; OVCAR3; SK-OV-3).

[1200] In a further representative example, the susceptibility of malignant melanoma cells to apoptosis induced by a THAP family or THAP domain polypeptide, or a biologically active fragment or homologue thereof can be tested in several known melanoma cell types: human melanoma WM 266-4 (ATCC CRL-1676); human malignant melanoma A-375 (ATCC CRL-1619); human malignant, melanoma A2058 (ATCC CRL-11147); human malignant melanoma SK-MEL-31 (ATCC HTB-73); human malignant melanoma RPMI-7591 ATCC HTB-66 (metastasis to lymph node). Primary melanoma isolates can also be tested. In addition, human chronic myelogenous leukemia K-562 cells (ATCC CCL-243), and 293 human kidney cells (ATCC CRL-1573) (transformed primary embryonal cell) are tested. Normal human primary dermal fibroblasts and Rat-1 fibroblasts serve as controls. All melanoma cell lines are metastatic on the basis of their isolation from metastases or metastatic nodules. A transient expression strategy is used in order to evaluate induction of a THAP-family or THAP domain polypeptide-mediated apoptosis without artifacts associated with prolonged selection. An expression vector encoding the THAP-family or THAP domain polypeptide-EGFP fusion protein described below can be used in order to facilitate identification of those cells expressing the a THAP-family or THAP domain polypeptide. Cells are transiently transfected by the method optimal for the cell being tested (either CaPO₄or Lipofectin). Expression of a THAP-family or THAP domain polypeptide and induction of apoptosis is examined using a fluorescence microscope at 24 hrs and 48 hrs post-transfection. A minimum of approximately 100 cells, which display characteristic EGFP fluorescence, are evaluated by fluorescence microscopy. Apoptosis is scored as nuclear fragmentation, marked apoptotic bodies, and cytoplasmic boiling. The characteristics of nuclear fragmentation are particularly visible when THAP-family or THAP domain polypeptide-EGFP condenses in apoptotic bodies.

[1201] In a further example, the susceptibility of endothelial cells to apoptosis induced by a THAP family or THAP domain polypeptide, or a biologically active fragment or homologue thereof can be tested in several known endothelial cell types: HUVEC (human umbilical vein endothelial cells; BioWhittaker-Clonetics, 8830 Biggs Ford Road, Walkersville, Md. 21793-0127, Cat No. CC-2519), HMVEC-L (human microvascular endothelial cells from the lung; BioWhittaker-Clonetics, 8830 Biggs Ford Road, Walkersville, Md. 21793-0127, Cat No. CC-2527), HMVEC-d (human microvascular endothelial cells from the dermis; BioWhittaker-Clonetics, 8830 Biggs Ford Road, Walkersville, MD 21793-0127, Cat No. CC-2543). These and other endothelial cell types may be useful as models in providing an indication of the ability of THAP-family or THAP domain polypeptides to induce apoptosis in therapeutic strategies for the regulation of angiogenesis. A transient expression strategy is used in order to evaluate induction of a THAP-family or THAP domain polypeptide-mediated apoptosis without artifacts associated with prolonged selection. An expression vector encoding the a THAP-family or THAP domain polypeptide-EGFP fusion protein described below can be used in order to facilitate identification of those cells expressing the a THAP-family or THAP domain polypeptide. Cells are transiently transfected by the method optimal for the cell being tested (either CaPO₄ or Lipofectin). Expression of a THAP-family or THAP domain polypeptide and induction of apoptosis is examined using a fluorescence microscope at 24 hrs and 48 hrs post-transfection. A minimum of approximately 100 cells, which display characteristic EGFP fluorescence, are evaluated by fluorescence microscopy. Apoptosis is scored as nuclear fragmentation, marked apoptotic bodies, and cytoplasmic boiling. The characteristics of nuclear fragmentation are particularly visible when THAP-family or THAP domain polypeptide-EGFP condenses in apoptotic bodies.

[1202] In another example, a transient transfection assay procedure is similar to that previously described for detecting apoptosis induced by IL-1-beta-converting enzyme (Miura et al., Cell 75: 653-660 (1993); Kumar et al., Genes Dev. 8: 1613-1626 (1994); Wang et al., Cell 78: 739-750 (1994); and U.S. Pat. No. 6,221,615, the disclosures of which are incorporated herein by reference). One day prior to transfection, cells (for example Rat-1 cells) are plated in 24 well dishes at 3.5*10⁴ cells/well. The following day, the cells are transfected with a marker plasmid encoding beta-galactosidase, in combination with an expression plasmid encoding THAP-family or THAP domain polypeptide, by the Lipofectamine procedure (Gibco/BRL). At 24 hours post transfection, cells are fixed and stained with X-Gal to detect beta-galactosidase expression in cells that received plasmid DNA (Miura et al., supra). The number of blue cells is counted by microscopic examination and scored as either live (flat blue cells) or dead (round blue cells). The cell killing activity of the THAP-family or THAP domain polypeptide in this assay is manifested by a large reduction in the number of blue cells obtained relative to co-transfection of the beta-gal plasmid with a control expression vector (i.e., with no THAP-family or THAP domain polypeptide cDNA insert).

[1203] In yet another example, beta-galactosidase co-transfection assays can be used for determination of cell death. The assay is performed as described (Hsu, H. et al, (1995). Cell 81,495-504; Hsu, H. et al, (1996a). Cell 84, 299-308; and Hsu, H. et al, (1996b) Inmunity 4, 387-396 and U.S. Pat. No. 6,242,569, the disclosures of which are incorporated herein by reference). Transfected cells are stained with X-gal as described in Shu, H. B. et al, ((1995) J. Cell Sci. 108, 2955-2962, the disclosure of which is incorporated herein by reference). The number of blue cells from 8 viewing fields of a 35 mm dish is determined by counting. The average number from one representative experiment is shown.

[1204] Assays for apoptosis can also be carried out by making use of any suitable biological marker of apoptosis. Several methods are described as follows.

[1205] In one aspect, fluorocytometric studies of cell death status can be carried out. Technology used in fluorocytometric studies employs the identification of cells at three different phases of the cell cycle: G₁, S, and G₂. This is largely performed by DNA quantity staining by propidium iodide labeling. Since the dying cell population contains the same DNA quantity as the living counterparts at any of the three phases of the cell cycle, there is no way to distinguish the two cell populations. One can perform double labeling for a biological marker of apoptosis (e.g. terminin Tp30, U.S. Pat. No. 5,783,667) positivity and propidium iodide (PI) staining together. Measurement of the labeling indices for the biological marker of apoptosis and PI staining can be used in combination to obtain the exact fractions of those cells in G₁ that are living and dying. Similar estimations can be made for the S-phase and G₂ phase cell populations.

[1206] In this assay, the cells are processed for formaldehyde fixation and extraction with 0.05% Triton. Afterwards, the cell specimens are incubated with monoclonal antibody to a marker of apoptosis overnight at room temperature or at 37C for one hour. This is followed by further incubation with fluoresceinated goat antimouse antibody, and subsequent incubation by propidium iodide staining. The completely processed cell specimens are then evaluated by fluorocytometric measurement on both fluorescence (marker of apoptosis) and rhodamine (PI) labeling intensity on a per cell basis, with the same cell population simultaneously.

[1207] In another aspect, it is possible to assess the inhibitory effect on cell growth by therapeutic induction of apoptosis. One routine method to determine whether a particular chemotherapeutic drug can inhibit cancerous cell growth is to examine cell population size either in culture, by measuring the reduction in cell colony size or number, or measuring soft agar colony growth or in vivo tumor formation in nude mice, which procedures require time for development of the colonies or tumor to be large enough to be detectable. Experiments involved in these approaches in general require large-scale planning and multiple repeats of lengthy experimental span (at least three weeks). Often these assays do not take into account the fact that a drug may not be inhibiting cell growth, but rather killing the cells, a more favorable consequence needed for chemotherapeutic treatment of cancer. Thus, assays for the assessment of apoptosis activity can involve using a biological or biochemical marker specific for quiescent, non-cycling or non-proliferating cells. For example, a monoclonal antibody can be used to assess the non-proliferating population of cells in a given tissue which indirectly gives a measure of the proliferating component of a tumor or cell mass. This detection can be combined with a biological or biochemical marker (e.g. antibodies) to detect the dying cell population pool, providing a powerful and rapid assessment of the effectiveness of any given drugs in the containment of cancerous cell growth. Applications can be easily performed at the immunofluorescence microscopic level with cultured cells or tissue sections.

[1208] In other aspects, a biological or biochemical marker can be used to assess pharmacological intervention on inhibition of cell death frequency in degenerative diseases. For degenerative diseases such as Alzheimer's or Parkinson's disease, these losses may be due to the premature activation of the cell death program in neurons. In osteoporosis, the cell loss may be due to an improper balance between osteoblast and osteoclast cells, due to the too active programmed cell death process killing more cells than the bone tissue can afford. Other related phenomena may also occur in the wound healing process, tissue transplantation and cell growth in the glomerus during kidney infection, where the balance between living and dying cell populations is an essential issue to the health status of the tissue, and are further described in the section titled “Methods of treatment”. A rapid assessment of dying cell populations can be made through the immunohistochemical and biochemical measurements of a biological or biochemical marker of apoptosis in degenerative tissues. In one example, a biological or biochemical marker can be used to assess cell death status in oligodendrocytes associated with Multiple Sclerosis. Positive staining of monoclonal antibody to a marker of apoptosis (such as Tp30, U.S. Pat. No. 5,783,667, the disclosure of which is incorporated herein by reference) occurs in dying cultured human oligodendrocytes. The programmed cell death event is activated in these oligodendrocytes by total deprivation of serum, or by treatment with tumor necrosis factor (TNF).

[1209] In general, a biological or biochemical marker can also be used to assess cell death status in pharmacological studies in animal models. Attempting to control either a reduced cell death rate, in the case of cancer, or an increased cell death rate, in the case of neurodegeneration, has been recently seen as a new mode of disease intervention. Numerous approaches via either intervention with known drugs or gene therapy are in progress, starting from the base of correcting the altered programmed cell death process, with the concept on maintaining a balanced cell mass in any given tissue. For these therapeutic interventions, the bridge between studies in cultured cells and clinical trials is animal studies, i.e. success in intervention with animal models, in either routine laboratory animals or transgenic mice bearing either knock-out or overexpression phenotypes. Thus, a biological or biochemical marker of apoptosis, such as an antibody for an apoptosis-specific protein, is a useful tool for examining apoptotic death status in terms of change in dying cell numbers between normal and experimentally manipulated animals. In this context the invention, as a diagnostic tool for assessing cell death status, could help to determine the efficacy and potency of a drug or a gene therapeutic approach.

[1210] As discussed, provided are methods for assessing the activity of THAP-family members and therapeutic treatment acting on THAP-family members or related biological pathways. However, in other aspects, the same methods may be used for assessment of apoptosis in general, when a THAP-family member is used as a biological marker of apoptosis. Thus, the invention also provides diagnostic and assay methods using a THAP-family member as a marker of cell death or apoptotic activity. Further diagnostic assays are also provided herein in the section titled ‘Diagnostic and prognostic uses’.

### Methods of Treatment

[1211] A large body of evidence gathered from experiments carried out with apoptosis modulating strategies suggests that treatments acting on apoptosis-inducing or cell proliferation-reducing proteins may offer new treatment methods for a wide range of disorders. Methods of treatment according to the invention may act in a variety of manners, given the novel function provided for a number of proteins, and the linking of several biological pathways.

[1212] Provided herein are treatment methods based on the functionalization of the THAP-family members. THAP family or THAP domain polypeptides, and biologically active fragments and homologues thereof, as described further herein may be useful in modulation of apoptosis or cell proliferation.

[1213] The methods of treatment involve acting on a molecule of the invention (that is, a THAP family member polypeptide, THAP-family target, or PAR4 or PAR4 target). Included are methods which involve modulating THAP-family polypeptide activity, THAP-family target activity, or PAR4 or PAR4 target activity. This modulation (increasing or decreasing) of activity can be carried out in a number of suitable ways, several of which have been described in the present application.

[1214] For example, methods of treatment may involve modulating a “THAP-family activity”, “biological activity of a THAP-family member” or “functional activity of a THAP-family member”. Modulating THAP-family activity may involve modulating an association with a THAP-family-target molecule (for example, association of THAP1, THAP2 or THAP3 with Par4 or association of THAP1, THAP2 or THAP3 with a PML-NB protein) or preferably any other activity selected from the group consisting of: (1) mediating apoptosis or cell proliferation when expressed or introduced into a cell, most preferably inducing or enhancing apoptosis, and/or most preferably reducing cell proliferation; (2) mediating apoptosis or cell proliferation of an endothelial cell; (3) mediating apoptosis or cell proliferation of a hyperproliferative cell; (4) mediating apoptosis or cell proliferation of a CNS cell, preferably a neuronal or glial cell; or (5) an activity determined in an animal selected from the group consisting of mediating, preferably inhibiting angiogenesis, mediating, preferably inhibiting inflammation, inhibition of metastatic potential of cancerous tissue, reduction of tumor burden, increase in sensitivity to chemotherapy or radiotherapy, killing a cancer cell, inhibition of the growth of a cancer cell, or induction of tumor regression. Detecting THAP-family activity may also comprise detecting any suitable therapeutic endpoint associated with a disease condition discussed herein.

[1215] In another example, methods of treatment may involve modulating a “PAR4 activity”, “biological activity of PAR4” or “functional activity of PAR4 ”. Modulating PAR4 activity may involve modulating an association with a PAR4-target molecule (for example THAP1, THAP2, THAP3 or PML-NB protein) or most preferably PAR4 apoptosis inducing or enhancing (e.g. signal transducing) activity, or inhibition of cell proliferation or cell cycle.

[1216] Methods of treatment may involve modulating the recruitment, binding or association of proteins to PML-NBs, or otherwise modulating PML-NBs activity. The present invention also provides methods for modulating PAR4 activity, comprising modulating PAR4 interactions with THAP-family proteins, and PAR4 and PML-NBs, as well as modulating THAP-family activity, comprising modulating for example THAP1 interactions with PML-NBs. The invention encompasses inhibiting or increasing the recruitment of THAP1, or PAR4 to PML-NBs. Preventing the binding of either or both of THAP1 or PAR4 to PML-NBs may increase the bioavailability or THAP1 and/or PAR4, thus providing a method of increasing THAP1 and/or PAR4 activity. The invention also encompasses inhibiting or increasing the binding of a THAP-family protein (such as THAP1) or PAR4 to PML-NBs or to another protein associated with PML-NBs, such as a protein selected from the group consisting of daxx, sp100, sp140, p53, pRB, CBP, BLM, SUMO-1. For example, the invention encompasses modulating PAR4 activity by preventing the binding of THAP1 to PAR4, or by preventing the recruitment or binding of PAR4 to PML-NBs.

[1217] Therapeutic methods and compositions of the invention may involve (1) modulating apoptosis or cell proliferation, most preferably inducing or enhancing apoptosis, and/or most preferably reducing cell proliferation; (2) modulating apoptosis or cell proliferation of an endothelial cell (3) modulating apoptosis or cell proliferation of a hyperproliferative cell; (4) modulating apoptosis or cell proliferation of a CNS cell, preferably a neuronal or glial cell; (5) inhibition of metastatic potential of cancerous tissue, reduction of tumor burden, increase in sensitivity to chemotherapy or radiotherapy, killing a cancer cell, inhibition of the growth of a cancer cell, or induction tumor regression; or (6) interaction with a THAP family target molecule or THAP domain target molecule, preferably interaction with a protein or a nucleic acid. Methods may also involve improving a symptom of or ameliorating a condition as further described herein.

[1218] Antiapoptotic Therapy

[1219] Molecules of the invention (e.g. those obtained using the screening methods described herein, dominant negative mutants, antibodies etc.) which inhibit apoptosis are also expected to be useful in the treatment and/or prevention of disease. Diseases in which it is desirable to prevent apoptosis include neurodegenerative diseases such as Alzheimer's disease, Parkinson's disease, amyotrophic lateral sclerosis, retinitis pigmentosa and cerebellar degeneration; myelodysplasis such as aplastic anemia; ischemic diseases such as myocardial infarction and stroke; hepatic diseases such as alcoholic hepatitis, hepatitis B and hepatitis C; joint-diseases such as osteoarthritis; atherosclerosis; and etc. The apoptosis inhibitor of the present invention is especially preferably used as an agent for prophylaxis or treatment of a neurodegenerative disease (see also Adams, J. M., Science, 281:1322 (1998).

[1220] Included as inhibitors of apoptosis as described herein are generally any molecule which inhibits activity of a THAP family or THAP domain polypeptide, or a biologically active fragment or homologue thereof, a THAP-family target protein or PAR4 (particularly PAR4/PML-NB protein interactions). THAP-family and THAP domain polypeptides inhibitors may include for example antibodies, peptides, dominant negative THAP-family or THAP domain analogs, small molecules, ribozyme or antisense nucleic acids. These inhibitors may be particularly advantageous in the treatment of neurodegenerative disorders. Particularly preferred are inhibitors which affect binding of THAP-family protein to a THAP-family target protein, and inhibitors which affect the DNA binding activity of a THAP-family protein.

[1221] In further preferred aspects the invention provides inhibitors of THAP-family activity, including but not limited to molecules which interfere or inhibit interactions of THAP-family proteins with PAR4, for the treatment of endothelial cell related disorders and neurodegenerative disorders. Support is found in the literature, as PAR4 appears to play a key role in neuronal apoptosis in various neurodegenerative disorders (Guo et al., 1998; Mattson et al., 2000; Mattson et al., 1999; Mattson et al., 2001). THAP1, which is expressed in brain and associates with PAR4 may therefore also play a key role in neuronal apoptosis. Drugs that inhibit THAP-family and/or inhibit THAP-family/PAR4 complex formation may lead to the development of novel preventative and therapeutic strategies for neurodegenerative disorders.

[1222] Apoptosis Regulation in Endothelial Cells

[1223] The invention also provides methods of regulating angiogenesis in a subject which are expected to be useful in the treatment of cancer, cardiovascular diseases and inflammatory diseases. An inducer of apoptosis of immortalized cells is expected to be useful in suppressing tumorigenesis and/or metastasis in malignant tumors. Examples of malignant tumors include leukemia (for example, myelocytic leukemia, lymphocytic leukemia such as Burkitt lymphoma), digestive tract carcinoma, lung carcinoma, pancreas carcinoma, ovary carcinoma, uterus carcinoma, brain tumor, malignant melanoma, other carcinomas, and sarcomas. The present inventors have isolated both THAP1 and PAR4 cDNAs from human endothelial cells, and both PAR4 and PML are known to be expressed predominantly in blood vessel endothelial cells (Boghaert et al., (1997) Cell Growth Differ 8(8):881-90; Terris B. et al, (1995) Cancer Res. 55(7):1590-7, 1995, the disclosures of which are incorporated herein by reference), suggesting that the PML-NBs-and the newly associated THAP1/PAR4 proapoptotic complex may be a major regulator of endothelial cell apoptosis in vivo and thus constitute an attractive therapeutic target for angiogenesis-dependent diseases. For example, THAP1 and PAR4 pathways may allow selective treatments that regulate (e.g. stimulate or inhibit) angiogenesis.

[1224] In a first aspect, the invention provides methods of inhibiting endothelial cell apoptosis, by administering a THAP1 or PAR4 inhibitor, or optionally a THAP1/PAR4 interaction inhibitor or optionally an inhibitor of THAP1 DNA binding activity. As further described herein, the THAP domain is involved in THAP1 pro-apoptotic activity. Deletion of the THAP domain abrogates the proapoptotic activity of THAP1 in mouse 3T3 fibroblasts, as shown in Example 11. Also, as further described herein, deletion of residues 168-172 or replacement of residues 17.1-172 abrogates THAP1 binding to PAR4 both in vitro and in vivo and results in lack of recruitment of PAR4 by THAP1 to PML-NBs. For PAR4, the leucine zipper domain is required (and is sufficient) for binding to THAP1.

[1225] Inhibiting endothelial cell apoptosis may improve angiogenesis and vasculogenesis in patients with ischemia and may also interfere with focal dysregulated vascular remodeling, the key mechanism for atherosclerotic disease progression.

[1226] In another aspect, the invention provides methods of inducing endothelial cell apoptosis, by administering for example a biologically active THAP family polypeptide such as THAP1, a THAP domain polypeptide or a PAR4 polypeptide, or a biologically active fragment or homologue thereof, or a THAP1 or PAR4 stimulator. Stimulation of endothelial cell apoptosis may prevent or inhibit angiogenesis and thus limit unwanted neovascularization of tumors or inflamed tissues (see Dimmeler and Zeiher, Circulation Research, 2000, 87 :434-439, the disclosure of which is incorporated herein by reference).

[1227] Angiogenesis

[1228] Angiogenesis is defined in adult organism as the formation of new blood vessels by a process of sprouting from pre-existing vessels. This neovascularization involves activation, migration, and proliferation of endothelial cells and is driven by several stimuli, among those shear stress. Under normal physiological conditions, humans or animals undergo angiogenesis only in very specific restricted situations. For example, angiogenesis is normally observed in wound healing, fetal and embryonal development and formation of the corpus luteum, endometrium and placenta. Molecules of the invention may have endothelial inhibiting or inducing activity, having the capability to inhibit or induce angiogenesis in general.

[1229] Both controlled and uncontrolled angiogenesis are thought to proceed in a similar manner. Endothelial cells and pericytes, surrounded by a basement membrane, form capillary blood vessels. Angiogenesis begins with the erosion of the basement membrane by enzymes released by endothelial cells and leukocytes. The endothelial cells, which line the lumen of blood vessels, then protrude through the basement membrane. Angiogenic stimulants induce the endothelial cells to migrate through the eroded basement membrane. The migrating cells form a “sprout” off the parent blood vessel, where the endothelial cells undergo mitosis and proliferate. The endothelial sprouts merge with each other to form capillary loops, creating the new blood vessel.

[1230] Persistent, unregulated angiogenesis occurs in a multiplicity of disease states, tumor metastasis and abnormal growth by endothelial cells and supports the pathological damage seen in these conditions. The diverse pathological disease states in which unregulated angiogenesis is present have been grouped together as angiogenic dependent or angiogenic associated diseases. It is thus an object of the present invention to provide methods and compositions for treating diseases and processes that are mediated by angiogenesis including, but not limited to, hemangioma, solid tumors, leukemia, metastasis, telangiectasia psoriasis scleroderma, pyogenic granuloma, Myocardial angiogenesis, plaque neovascularization, cororany collaterals, ischemic limb angiogenesis, corneal diseases, rubeosis, neovascular glaucoma, diabetic retinopathy, retrolental fibroplasia, arthritis, diabetic neovascularization, macular degeneration, wound healing, peptic ulcer, fractures, keloids, vasculogenesis, hematopoiesis, ovulation, menstruation, and placentation.

[1231] (i) Anti-angiogenic Therapy

[1232] In one aspect the invention provides anti-angiogenic therapies as potential treatments for a wide variety of diseases, including cancer, arteriosclerosis, obesity, arthritis, duodenal ulcers, psoriasis, proliferative skin disorders, cardiovascular disorders and abnormal ocular neovascularization caused, for example, by diabetes (Folkman, Nature Medicine 1:27 (1995) and Folkinan, Seminars in Medicine of the Beth Israel Hospital, Boston, New England Journal of Medicine, 333:1757 (1995)). Anti-angiogenic therapies are thought to act by inhibiting the formation of new blood vessels.

[1233] The present invention thus provides methods and compositions for treating diseases and processes mediated by undesired and uncontrolled angiogenesis by administering to a human or animal a composition comprising a substantially purified THAP family or THAP domain polypeptide, or a biologically active fragment, homologue or derivative thereof in a dosage sufficient to inhibit angiogenesis, administering a vector capable of expressing a nucleic acid encoding a THAP-family or THAP domain protein, or administering any other inducer of expression or activity of a THAP-family or THAP domain protein. The present invention is particularly useful for treating or for repressing the growth of tumors. Administration of THAP-family or THAP domain nucleic acid, protein or other inducer to a human or animal with prevascularized metastasized tumors will prevent the growth or expansion of those tumors. THAP-family activity may be used in combination with other compositions and procedures for the treatment of diseases. For example, a tumor may be treated conventionally with surgery, radiation or chemotherapy combined with THAP-family or THAP domain protein and then THAP-family or THAP domain protein may be subsequently administered to the patient to extend the dormancy of micrometastases and to stabilize any residual primary tumor.

[1234] In a preferred example, a THAP-family polypeptide activity, preferably a THAP1 activity is used for the treatment of arthritis, for example rheumatiod arthritis. Rheumatoid arthritis is characterized by symmetric, polyarticular inflammation of synovial-lined joints, and may involve extraarticular tissues, such as the pericardium, lung, and blood vessels.

[1235] (ii) Angiogenic Therapy

[1236] In another aspect, the inhibitors of THAP-family protein activity, particularly THAP1 activity, could be used as an anti-apoptotic and thus as an angiogenic therapy. Angiogenic therapies are potential treatments for promoting wound healing and for stimulating the growth of new blood vessels to by-pass occluded ones. Thus, pro-angiogenic therapies could potentially augment or replace by-pass surgeries and balloon angioplasty (PTCA). For example, with respect to neovascularization to bypass occluded blood vessels, a “therapeutically effective amount” is a quantity which results in the formation of new blood vessels which can transport at least some of the blood which normally would pass through the blocked vessel.

[1237] The THAP-family protein of the present invention can for example be used to generate antibodies that can be used as inhibitors of apoptosis. The antibodies can be either polyclonal antibodies or monoclonal antibodies. In addition, these antibodies that specifically bind to the THAP-family protein can be used in diagnostic methods and kits that are well known to those of ordinary skill in the art to detect or quantify the THAP-family protein in a body fluid. Results from these tests can be used to diagnose or predict the occurrence or recurrence of a cancer and other angiogenic mediated diseases.

[1238] It will be appreciated that other inhibitors of THAP-family and THAP domain proteins can also be used in angiogenic therapies, including for example small molecules, antisense nucleic acids, dominant negative THAP-family and THAP domain proteins or peptides identified using the above methods.

[1239] In view of applications in both angiogenic and antiangiogenic therapies, molecules of the invention may have endothelial inhibiting or inducing activity, having the capability to inhibit or induce angiogenesis in general. It will be appreciated that methods of assessing such capability are known in the art, including for example assessing antiangiogenic properties as the ability inhibit the growth of bovine capillary endothelial cells in culture in the presence of fibroblast growth factor.

[1240] It is to be understood that the present invention is contemplated to include any derivatives of the THAP family or THAP domain polypeptides, and biologically active fragments and homologues thereof that have endothelial inhibitory or apoptotic activity. The present invention includes full-length THAP-family and THAP domain proteins, derivatives of the THAP-family and THAP domain proteins and biologically-active fragments of the THAP-family and THAP domain proteins. These include proteins with THAP-family protein activity that have amino acid substitutions or have sugars or other molecules attached to amino acid functional groups. The methods also contemplate the use of genes that code for a THAP-family protein and to proteins that are expressed by those genes.

[1241] As discussed, several methods are described herein for delivering a modulator to a subject in need of treatment, including for example small molecule modulators, nucleic acids including via gene therapy vectors, and polypeptides including peptide mimetics, active polypeptides, dominant negative polypeptides and antibodies. It will be thus be appreciated that modulators of the invention identified according to the methods in the section titled “Drug Screening Assays” can be further tested in cell or animal models for their ability to ameliorate or prevent a condition involving a THAP-family polypeptide, particularly THAP1, THAP1, THAP2 or THAP3/PAR4 interactions, THAP-family DNA binding or PAR4/PML-NBs interactions. Likewise, nucleic acids, polypeptides and vectors (e.g. viral) can also be assessed in a similar manner.

[1242] An “individual” treated by the methods of this invention is a vertebrate, particularly a mammal (including model animals of human disease, farm animals, sport animals, and pets), and typically a human.

[1243] “Treatment” refers to clinical intervention in an attempt to alter the natural course of the individual being treated, and may be performed either for prophylaxis or during the course of clinical pathology. Desirable effects include preventing occurrence or recurrence of disease, alleviation of symptoms, diminishment of any direct or indirect pathological consequences of the disease, such as hyperresponsiveness, inflammation, or necrosis, lowering the rate of disease progression, amelioration or palliation of the disease state, and remission or improved prognosis. The “pathology” associated with a disease condition is anything that compromises the well-being, normal physiology, or quality of life of the affected individual.

[1244] Treatment is performed by administering an effective amount of a THAP-family polypeptide inhibitor or activator. An “effective amount” is an amount sufficient to effect a beneficial or desired clinical result, and can be administered in one or more doses.

[1245] The criteria for assessing response to therapeutic modalities employing the lipid compositions of this invention are dictated by the specific condition, measured according to standard medical procedures appropriate for the condition.

### Reducing Chemokine Mediated Effects

[1246] Some aspects of the present invention relate to the use of THAP-family polypeptides, including THAP-1, chemokine-binding domains of THAP-family polypeptides, THAP-family polypeptide or THAP-family chemokine-binding domain fusions to immunoglobulin Fc, oligomers of THAP-family polypeptides or THAP-family chemokine-binding domains, or homologs of any of the above-listed compositions (together and herein after referred to as THAP-type chemokine-binding agents) for reducing the inflammation or the symptoms associated with diseases or conditions that are influenced or mediated by chemokine binding or activity. In such embodiments, the THAP-type chemokine binding agents are administered to a subject in effective amounts so as to reduce the symptoms associated with the condition. In some embodiments, the chemokine that is effected by the THAP-type chemokine binding agent is SLC, CCL19, CCL5, CXCL9, CXCL10 or a combination of these chemokines. In other embodiments, the chemokine that is effected by the THAP-type chemokine binding agent is XCL1, XCL2, CCL1, CCL2, CCL3, CCL3L1, SCYA3L2, CCL4, CCL4L, CCL5, CCL6, CCL7, CCL8, SCYA9, SCYA10, CCL11, SCYA12, CCL13, CCL14, CCL15, CCL16, CCL17, CCL18, CCL19, CCL20, CCL21, CCL22, CCL23, CCL24, CCL25, CCL26, CCL27, CCL28, clone 391, CARP CC-1, CCL1, CK-1, regakine-1, K203, CXCL1, CXCL1P, CXCL2, CXCL3, PF4, PF4V1, CXCL5, CXCL6, PPBP, SPBPBP, IL8, CXCL9, CXCL10, CXCL11, CXCL12, CXCL14, CXCL15, CXCL16, NAP-4, LFCA-1, Scyba, JSC, VHSV-induced protein, CX3CL1, fCL1 or a combination of these chemokines. In some embodiments, the THAP-type chemokine-binding agent is administered directly whereas in other embodiments it is administered as a pharmaceutical composition. In either case, the routes of administration that are known in the art and described herein may be used to deliver the THAP-type chemokine-binding agent to the subject.

[1247] Some embodiments of the present invention relate to a device for delivering the THAP-type chemokine-binding agent or pharmaceutical composition thereof to the subject. In such embodiment, the device comprises a container which contains the THAP-type chemokine-binding agent or pharmaceutical composition thereof. For example, in some embodiments, the device may be a conventional device including, but not limited to, syringes, devices for intranasal administration of compositions and vaccine guns. In one embodiment, the device comprises a member which receives the THAP-type chemokine-binding agent or pharmaceutical composition thereof in communication with a mechanism for delivering the composition to the subject. In some embodiments, the device is an inhaler or a patch for transdermal administration.

[1248] Pharmaceutical Compositions

[1249] Compounds capable of inhibiting THAP-family activity, preferably small molecules but also including peptides, THAP-family nucleic acid molecules, THAP-family proteins, and anti-THAP-family antibodies (also referred to herein as “active compounds”) of the invention can be incorporated into pharmaceutical compositions suitable for administration. Such compositions typically comprise a pharmaceutically acceptable carrier. As used herein the language “pharmaceutically acceptable carrier” is intended to include any and all solvents, dispersion media, coatings, antibacterial and antifungal agents, isotonic and absorption delaying agents, and the like, compatible with pharmaceutical administration. The use of such media and agents for pharmaceutically active substances is well known in the art. Except insofar as any conventional media or agent is incompatible with the active compound, use thereof in the compositions is contemplated. Supplementary active compounds can also be incorporated into the compositions.

[1250] A pharmaceutical composition of the invention is formulated to be compatible with its intended route of administration. Examples of routes of administration include parenteral, e.g., intravenous, intradermal, subcutaneous, oral (e.g., inhalation), transdermal (topical), transmucosal, and rectal administration. Solutions or suspensions used for parenteral, intradermal, or subcutaneous application can include the following components: a sterile diluent such as water for injection, saline solution, fixed oils, polyethylene glycols, glycerine, propylene glycol or other synthetic solvents; antibacterial agents such as benzyl alcohol or methyl parabens; antioxidants such as ascorbic acid or sodium bisulfite; chelating agents such as ethylenediaminetetraacetic acid; buffers such as acetates, citrates or phosphates and agents for the adjustment of tonicity such as sodium chloride or dextrose. pH can be adjusted with acids or bases, such as hydrochloric acid or sodium hydroxide. The parenteral preparation can be enclosed in ampoules, disposable syringes or multiple dose vials made of glass or plastic.

[1251] Pharmaceutical compositions suitable for injectable use include sterile aqueous solutions (where water soluble) or dispersions and sterile powders for the extemporaneous preparation of sterile injectable solutions or dispersion. For intravenous administration, suitable carriers include physiological saline, bacteriostatic water, Cremophor ELα (BASF, Parsippany, N.J.) or phosphate buffered saline (PBS). In all cases, the composition must be sterile and should be fluid to the extent that easy syringability exists. It must be stable under the conditions of manufacture and storage and must be preserved against the contaminating action of microorganisms such as bacteria and fungi. The carrier can be a solvent or dispersion medium containing, for example, water, ethanol, polyol (for example, glycerol, propylene glycol, and liquid polyetheylene glycol, and the like), and suitable mixtures thereof. The proper fluidity can be maintained, for example, by the use of a coating such as lecithin, by the maintenance of the required particle size in the case of dispersion and by the use of surfactants. Prevention of the action of microorganisms can be achieved by various antibacterial and antifungal agents, for example, parabens, chlorobutanol, phenol, ascorbic acid, thimerosal, and the like. In many cases, it will be preferable to include isotonic agents, for example, sugars, polyalcohols such as manitol, sorbitol, sodium chloride in the composition. Prolonged absorption of the injectable compositions can be brought about by including in the composition an agent which delays absorption, for example, aluminum monostearate and gelatin.

[1252] Where the active compound is a protein, peptide or anti-THAP-family antibody, sterile injectable solutions can be prepared by incorporating the active compound (e.g.,) in the required amount in an appropriate solvent with one or a combination of ingredients enumerated above, as required, followed by filtered sterilization. Generally, dispersions are prepared by incorporating the active compound into a sterile vehicle which contains a basic dispersion medium and the required other ingredients from those enumerated above. In the case of sterile powders for the preparation of sterile injectable solutions, the preferred methods of preparation are vacuum drying and freeze-drying which yields a powder of the active ingredient plus any additional desired ingredient from a previously sterile-filtered solution thereof.

[1253] Oral compositions generally include an inert diluent or an edible carrier. They can be enclosed in gelatin capsules or compressed into tablets. For the purpose of oral therapeutic administration, the active compound can be incorporated with excipients and used in the form of tablets, troches, or capsules. For administration by inhalation, the compounds are delivered in the form of an aerosol spray from pressured container or dispenser which contains a suitable propellant, e.g., a gas such as carbon dioxide, or a nebulizer. Systemic administration can also be by transmucosal or transdermal means. For transmucosal or transdermal administration, penetrants appropriate to the barrier to be permeated are used in the formulation. Such penetrants are generally known in the art, and include, for example, for transmucosal administration, detergents, bile salts, and fusidic acid derivatives. Transmucosal administration can be accomplished through the use of nasal sprays or suppositories. For transdermal administration, the active compounds are formulated into ointments, salves, gels, or creams as generally known in the art. Most preferably, active compound is delivered to a subject by intravenous injection.

[1254] In one embodiment, the active compounds are prepared with carriers that will protect the compound against rapid elimination from the body, such as a controlled release formulation, including implants and microencapsulated delivery systems. Biodegradable, biocompatible polymers can be used, such as ethylene vinyl acetate, polyanhydrides, polyglycolic acid, collagen, polyorthoesters, and polylactic acid. Methods for preparation of such formulations will be apparent to those skilled in the art. The materials can also be obtained commercially from Alza Corporation and Nova Pharmaceuticals, Inc. Liposomal suspensions (including liposomes targeted to infected cells with monoclonal antibodies to viral antigens) can also be used as pharmaceutically acceptable carriers. These can be prepared according to methods known to those skilled in the art, for example, as described in U.S. Pat. No. 4,522,811, the disclosure of which is incorporated herein by reference in its entirety.

[1255] It is especially advantageous to formulate oral or preferably parenteral compositions in dosage unit form for ease of administration and uniformity of dosage. Dosage unit form as used herein refers to physically discrete units suited as unitary dosages for the subject to be treated; each unit containing a predetermined quantity of active compound calculated to produce the desired therapeutic effect in association with the required pharmaceutical carrier. The specification for the dosage unit forms of the invention are dictated by and directly dependent on the unique characteristics of the active compound and the particular therapeutic effect to be achieved, and the limitations inherent in the art of compounding such an active compound for the treatment of individuals.

[1256] Toxicity and therapeutic efficacy of such compounds can be determined by standard pharmaceutical procedures in cell cultures or experimental animals, e.g., for determining the LD50 (the dose lethal to 50% of the population) and the ED50 (the dose therapeutically effective in 50% of the population). The dose ratio between toxic and therapeutic effects is the therapeutic index and it can be expressed as the ratio LD50/ED50. Compounds which exhibit large therapeutic indices are preferred. While compounds that exhibit toxic side effects may be used, care should be taken to design a delivery system that targets such compounds to the site of affected tissue in order to minimize potential damage to uninfected cells and, thereby, reduce side effects.

[1257] The data obtained from the cell culture assays and animal studies can be used in formulating a range of dosage for use in humans. The dosage of such compounds lies preferably within a range of circulating concentrations that include the ED50 with little or no toxicity. The dosage may vary within this range depending upon the dosage form employed and the route of administration utilized. For any compound used in the method of the invention, the therapeutically effective dose can be estimated initially from cell culture assays. A dose may be formulated in animal models to achieve a circulating plasma concentration range that includes the IC50 (i.e., the concentration of the test compound which achieves a half-maximal inhibition of symptoms) as determined in cell culture. Such information can be used to more accurately determine useful doses in humans. Levels in plasma may be measured, for example, by high performance liquid chromatography.

[1258] The pharmaceutical compositions can be included in a container, pack, or dispenser together with instructions for administration.

[1259] It will be appreciated that THAP-type chemokine-binding agents can be formulated as pharmaceutical compositions and administered as described above. Additionally, the effective dose, route of administration, duration of administration, duration between doses and therapeutic effect can be determined by the methods described above as well as using methods that are well known in the art.

[1260] Diagnostic and Prognostic Uses

[1261] The nucleic acid molecules, proteins, protein homologues, and antibodies described herein can be used in one or more of the following methods: diagnostic assays, prognostic assays, monitoring clinical trials, and pharmacogenetics; and in drug screening and methods of treatment (e.g., therapeutic and prophylactic) as further described herein.

[1262] The invention provides diagnostic and prognositc assays for detecting THAP-family members, as further described. Also provided are diagnostic and prognostic assays for detecting interactions between THAP-family members and THAP-family target molecules. In a preferred example, a THAP-family member is THAP1, THAP2 or THAP3 and the THAP-family target is PAR4 or a PML-NB protein.

[1263] The invention also provides diagnostic and prognositc assays for detecting THAP1 and/or PAR4 localization to or association with PML-NBs, or association with or binding to a PML-NB-associated protein, such as daxx, sp100, sp140, p53, pRB, CBP, BLM or SUMO-1. In a preferred method, the invention provides detecting PAR4 localization to or association with PML-NBs. In a further aspect, the invention provides detecting THAP-family nucleic acid binding activity.

[1264] The isolated nucleic acid molecules of the invention can be used, for example, to detect THAP-family polypeptide mRNA (e.g., in a biological sample) or a genetic alteration in a THAP-family gene, and to modulate a THAP-family polypeptide activity, as described further below. The THAP-family proteins can be used to treat disorders characterized by insufficient or excessive production of a THAP-family protein or THAP-family target molecules. In addition, the THAP-family proteins can be used to screen for naturally occurring THAP-family target molecules, to screen for drugs or compounds which modulate, preferably inhibit THAP-family activity, as well as to treat disorders characterized by insufficient or excessive production of THAP-family protein or production of THAP-family protein forms which have decreased or aberrant activity compared to THAP-family wild type protein. Moreover, the anti-THAP-family antibodies of the invention can be used to detect and isolate THAP-family proteins, regulate the bioavailability of THAP-family proteins, and modulate THAP-family activity.

[1265] Accordingly one embodiment of the present invention involves a method of use (e.g., a diagnostic assay, prognostic assay, or a prophylactic/therapeutic method of treatment) wherein a molecule of the present invention (e.g., a THAP-family protein, THAP-family nucleic acid, or most preferably a THAP-family inhibitor or activator) is used, for example, to diagnose, prognose and/or treat a disease and/or condition in which any of the aforementioned THAP-family activities is indicated. In another embodiment, the present invention involves a method of use (e.g., a diagnostic assay, prognostic assay, or a prophylactic/therapeutic method of treatment) wherein a molecule of the present invention (e.g., a THAP-family protein, THAP-family nucleic acid, or a THAP-family inhibitor or activator) is used, for example, for the diagnosis, prognosis, and/or treatment of subjects, preferably a human subject, in which any of the aforementioned activities is pathologically perturbed. In a preferred embodiment, the methods of use (e.g., diagnostic assays, prognostic assays, or prophylactic/therapeutic methods of treatment) involve administering to a subject, preferably a human subject, a molecule of the present invention (e.g., a THAP-family protein, THAP-family nucleic acid, or a THAP-family inhibitor or activator) for the diagnosis, prognosis, and/or therapeutic treatment. In another embodiment, the methods of use (e.g., diagnostic assays, prognostic assays, or prophylactic/therapeutic methods of treatment) involve administering to a human subject a molecule of the present invention (e.g., a THAP-family protein, THAP-family nucleic acid, or a THAP-family inhibitor or activator).

[1266] For example, the invention encompasses a method of determining whether a THAP-family member is expressed within a biological sample comprising: a) contacting said biological sample with: ii) a polynucleotide that hybridizes under stringent conditions to a THAP-family nucleic acid; or iii) a detectable polypeptide (e.g. antibody) that selectively binds to a THAP-family polypeptide; and b) detecting the presence or absence of hybridization between said polynucleotide and an RNA species within said sample, or the presence or absence of binding of said detectable polypeptide to a polypeptide within said sample. A detection of said hybridization or of said binding indicates that said THAP-family member is expressed within said sample. Preferably, the polynucleotide is a primer, and wherein said hybridization is detected by detecting the presence of an amplification product comprising said primer sequence, or the detectable polypeptide is an antibody.

[1267] Also envisioned is a method of determining whether a mammal, preferably human, has an elevated or reduced level of expression of a THAP-family member, comprising: a) providing a biological sample from said mammal; and b) comparing the amount of a THAP-family polypeptide or of a THAP-family RNA species encoding a THAP-family polypeptide within said biological sample with a level detected in or expected from a control sample. An increased amount of said THAP-family polypeptide or said THAP-family RNA species within said biological sample compared to said level detected in or expected from said control sample indicates that said mammal has an elevated level of THAP-family expression, and a decreased amount of said THAP-family polypeptide or said THAP-family RNA species within said biological sample compared to said level detected in or expected from said control sample indicates that said mammal has a reduced level of expression of a THAP-family member.

[1268] The present invention also pertains to the field of predictive medicine in which diagnostic assays, prognostic assays, and monitoring clinical trials are used for prognostic (predictive) purposes to thereby treat an individual prophylactically. Accordingly, one aspect of the present invention relates to diagnostic assays for determining THAP-family protein and/or nucleic acid expression as well as THAP-family activity, in the context of a biological sample (e.g., blood, serum, cells, tissue) to thereby determine whether an individual is afflicted with a disease or disorder, or is at risk of developing a disorder, associated with aberrant THAP-family expression or activity. The invention also provides for prognostic (or predictive) assays for determining whether an individual is at risk of developing a disorder associated with a THAP-family protein, nucleic acid expression or activity. For example, mutations in a THAP-family gene can be assayed in a biological sample. Such assays can be used for prognostic or predictive purpose to thereby phophylactically treat an individual prior to the onset of a disorder characterized by or associated with a THAP-family protein, nucleic acid expression or activity.

[1269] Accordingly, the methods of the present invention are applicable generally to diseases related to regulation of apoptosis, including but not limited to disorders characterized by unwanted cell proliferation or generally aberrant control of differentiation, for example neoplastic or hyperplastic disorders, as well as disorders related to proliferation or lack thereof of endothelial cells, inflammatory disorders and neurodegenerative disorders.

[1270] Diagnostic Assays

[1271] An exemplary method for detecting the presence (quantitative or not) or absence of a THAP-family protein or nucleic acid in a biological sample involves obtaining a biological sample from a test subject and contacting the biological sample with a compound or an agent capable of detecting a THAP-family protein or nucleic acid (e.g., mRNA, genomic DNA) that encodes THAP-family protein such that the presence of the THAP-family protein or nucleic acid is detected in the biological sample. A preferred agent for detecting a THAP-family mRNA or genomic DNA is a labeled nucleic acid probe capable of hybridizing to a THAP-family mRNA or genomic DNA. The nucleic acid probe can be, for example, a full-length THAP-family nucleic acid, such as the nucleic acid of SEQ ID NO: 160 such as a nucleic acid of at least 15, 30, 50, 100, 250, 400, 500 or 1000 nucleotides in length and sufficient to specifically hybridize under stringent conditions to a THAP-family mRNA or genomic DNA or a portion of a THAP-family nucleic acid. Other suitable probes for use in the diagnostic assays of the invention are described herein.

[1272] In preferred embodiments, the subject method can be characterized by generally comprising detecting, in a tissue sample of the subject (e.g. a human patient), the presence or absence of a genetic lesion characterized by at least one of (i) a mutation of a gene encoding one of the subject THAP-family proteins or (ii) the mis-expression of a THAP-family gene. To illustrate, such genetic lesions can be detected by ascertaining the existence of at least one of (i) a deletion of one or more nucleotides from a THAP-family gene, (ii) an addition of one or more nucleotides to such a THAP-family gene, (iii) a substitution of one or more nucleotides of a THAP-family gene, (iv) a gross chromosomal rearrangement or amplification of a THAP-family gene, (v) a gross alteration in the level of a messenger RNA transcript of a THAP-family gene, (vi) aberrant modification of a THAP-family gene, such as of the methylation pattern of the genomic DNA, (vii) the presence of a non-wild type splicing pattern of a messenger RNA transcript of a THAP-family gene, and (viii) a non-wild type level of a THAP-family target protein.

[1273] A preferred agent for detecting a THAP-family protein is an antibody capable of binding to a THAP-family protein, preferably an antibody with a detectable label. Antibodies can be polyclonal, or more preferably, monoclonal. An intact antibody, or a fragment thereof (e.g., Fab or F(ab′)₂) can be used. The term “labeled”, with regard to the probe or antibody, is intended to encompass direct labeling of the probe or antibody by coupling (i.e., physically linking) a detectable substance to the probe or antibody, as well as indirect labeling of the probe or antibody by reactivity with another reagent that is directly labeled. Examples of indirect labeling include detection of a primary antibody using a fluorescently labeled secondary antibody and end-labeling of a DNA probe with biotin such that it can be detected with fluorescently labeled streptavidin. The term “biological sample” is intended to include tissues, cells and biological fluids isolated from a subject, as well as tissues, cells and fluids present within a subject. That is, the detection method of the invention can be used to detect a THAP-family mRNA, protein, or genomic DNA in a biological sample in vitro as well as in vivo. For example, in vitro techniques for detection of a THAP-family mRNA include Northern hybridizations and in situ hybridizations. In vitro techniques for detection of a THAP-family protein include enzyme linked immunosorbent assays (ELISAs), Western blots, immunoprecipitations and immunofluorescence. In vitro techniques for detection of a THAP-family genomic DNA include Southern hybridizations. Furthermore, in vivo techniques for detection of a THAP-family protein include introducing into a subject a labeled anti-THAP-family antibody. For example, the antibody can be labeled with a radioactive marker whose presence and location in a subject can be detected by standard imaging techniques.

[1274] In yet another exemplary embodiment, aberrant methylation patterns of a THAP-family gene can be detected by digesting genomic DNA from a patient sample with one or more restriction endonucleases that are sensitive to methylation and for which recognition sites exist in the THAP-family gene (including in the flanking and intronic sequences). See, for example, Buiting et al. (1994) Human Mol Genet 3:893-895. Digested DNA is separated by gel electrophoresis, and hybridized with probes derived from, for example, genomic or cDNA sequences. The methylation status of the THAP-family gene can be determined by comparison of the restriction pattern generated from the sample DNA with that for a standard of known methylation.

[1275] Furthermore, gene constructs such as those described herein can be utilized in diagnostic assays to determine if a cell's growth or differentiation state is no longer dependent on the regulatory function of a THAP-family protein, e.g. in determining the phenotype of a transformed cell. Such knowledge can have both prognostic and therapeutic benefits. To illustrate, a sample of cells from the tissue can be obtained from a patient and dispersed in appropriate cell culture media, a portion of the cells in the sample can be caused to express a recombinant THAP-family protein or a THAP-family target protein, e.g. by transfection with a expression vector described herein, or to increase the expression or activity of an endogenous THAP-family protein or THAP-family target protein, and subsequent growth of the cells assessed. The absence of a change in phenotype of the cells despite expression of the THAP-family or THAP-family target protein may be indicative of a lack of dependence on cell regulatory pathways which includes the THAP-family or THAP-family target protein, e.g. THAP-family- or THAP-family target-mediated transcription. Depending on the nature of the tissue of interest, the sample can be in the form of cells isolated from, for example, a blood sample, an exfoliated cell sample, a fine needle aspirant sample, or a biopsied tissue sample. Where the initial sample is a solid mass, the tissue sample can be minced or otherwise dispersed so that cells can be cultured, as is known in the art.

[1276] In yet another embodiment, a diagnostic assay is provided which detects the ability of a THAP-family gene product, e.g., isolated from a biopsied cell, to bind to other cellular proteins. For instance, it will be desirable to detect THAP-family mutants which, while expressed at appreciable levels in the cell, are defective at binding a THAP-family target protein (having either diminished or enhanced binding affinity). Such mutants may arise, for example, from mutations, e.g., point mutants, which may be impractical to detect by the diagnostic DNA sequencing techniques or by the immunoassays described above. The present invention accordingly further contemplates diagnostic screening assays which generally comprise cloning one or more THAP-family genes from the sample cells, and expressing the cloned genes under conditions which permit detection of an interaction between that recombinant gene product and a target protein, e.g., for example the THAP1 gene and a target PAR4 protein or a PML-NB protein. As will be apparent from the description of the various drug screening assays set forth below, a wide variety of techniques can be used to determine the ability of a THAP-family protein to bind to other cellular components. These techniques can be used to detect mutations in a THAP-family gene which give rise to mutant proteins with a higher or lower binding affinity for a THAP-family target protein relative to the wild-type THAP-family. Conversely, by switching which of the THAP-family target protein and THAP-family protein is the “bait” and which is derived from the patient sample, the subject assay can also be used to detect THAP-family target protein mutants which have a higher or lower binding affinity for a THAP-family protein relative to a wild type form of that THAP-family target protein.

[1277] In an exemplary embodiment, a PAR4 or a PMB-NB protein (e.g. wild-type) can be provided as an immobilized protein (a “target”), such as by use of GST fusion proteins and glutathione treated microtitre plates. A THAP1 gene (a “sample” gene) is amplified from cells of a patient sample, e.g., by PCR, ligated into an expression vector, and transformed into an appropriate host cell. The recombinantly produced THAP1 protein is then contacted with the immobilized PAR4 lysate or a semi-purified preparation, the complex washed, and the amount of PAR4 or PMB-NB protein/THAP1 complex determined and compared to a level of wild-type complex formed in a control. Detection can be by, for instance, an immunoassay using antibodies against the wild-type form of the THAP1 protein, or by virtue of a label provided by cloning the sample THAP1 gene into a vector which provides the protein as a fusion protein including a detectable tag. For example, a myc epitope can be provided as part of a fusion protein with the sample THAP1 gene. Such fusion proteins can, in addition to providing a detectable label, also permit purification of the sample THAP1 protein from the lysate prior to application to the immobilized target. In yet another embodiment of the subject screening assay, the two hybrid assay, described in the appended examples, can be used to detect mutations in either a THAP-family gene or THAP-family target gene which alter complex formation between those two proteins.

[1278] Accordingly, the present invention provides a convenient method for detecting mutants of THAP-family genes encoding proteins which are unable to physically interact with a THAP-family target “bait” protein, which method relies on detecting the reconstitution of a transcriptional activator in a THAP-family/THAP-family target-dependent fashion.

[1279] In one embodiment, the biological sample contains protein molecules from the test subject. Alternatively, the biological sample can contain mRNA molecules from the test subject or genomic DNA molecules from the test subject. A preferred biological sample is a serum sample isolated by conventional means from a subject. In another embodiment, the methods further involve obtaining a control biological sample from a control subject, contacting the control sample with a compound or agent capable of detecting a THAP-family protein, mRNA, or genomic DNA, such that the presence of a THAP-family protein, mRNA or genomic DNA is detected in the biological sample, and comparing the presence of a THAP-family protein, mRNA or genomic DNA in the control sample with the presence of a THAP-family protein, mRNA or genomic DNA in the test sample. The invention also encompasses kits for detecting the presence of THAP-family protein, mRNA or genomic DNA in a biological sample. For example, the kit can comprise a labeled compound or agent capable of detecting a THAP-family protein or mRNA or genomic DNA in a biological sample; means for determining the amount of a THAP-family member in the sample; and means for comparing the amount of THAP-family member in the sample with a standard. The compound or agent can be packaged in a suitable container. The kit can further comprise instructions for using the kit to detect THAP-family protein or nucleic acid.

[1280] In certain embodiments, detection involves the use of a probe/primer in a polymerase chain reaction (PCR) (see, e.g., U.S. Pat. Nos. 4,683,195 and 4,683,202, the disclosures of which are incorporated herein by reference in their entireties), such as anchor PCR or RACE PCR, or, alternatively, in a ligation chain reaction (LCR) (see, e.g., Landegren et al. (1988) Science 241:1077-1080; and Nakazawa et al. (1994) PNAS 91:360-364, the disclosures of which are incorporated herein by reference in their entireties), the latter of which can be particularly useful for detecting point mutations in the THAP-family-gene (see Abravaya et al. (1995) Nucleic Acids Res. 23:675-682, the disclosure of which is incorporated herein by reference in its entirety). This method can include the steps of collecting a sample of cells from a patient, isolating nucleic acid (e.g., genomic, mRNA or both) from the cells of the sample, contacting the nucleic acid sample with one or more primers which specifically hybridize to a THAP-family gene under conditions such that hybridization and amplification of the THAP-family-gene (if present) occurs, and detecting the presence or absence of an amplification product, or detecting the size of the amplification product and comparing the length to a control sample. It is anticipated that PCR and/or LCR may be desirable to use as a preliminary amplification step in conjunction with any of the techniques used for detecting mutations described herein.

[1281] Genotyping assays for diagnostics generally require the previous amplification of the DNA region carrying the biallelic marker of interest. However, ultrasensitive detection methods which do not require amplification are also available. Methods well-known to those skilled in the art that can be used to detect biallelic polymorphisms include methods such as, conventional dot blot analyzes, single strand conformational polymorphism analysis (SSCP) described by Orita et al., PNAS 86: 2766-2770 (1989), the disclosure of which is incorporated herein by reference in its entirety, denaturing gradient gel electrophoresis (DGGE), heteroduplex analysis, mismatch cleavage detection, and other conventional techniques as described in Sheffield et al. (1991), White et al. (1992), and Grompe et al. (1989 and 1993) (Sheffield, V.C. et al, Proc. Natl. Acad. Sci. U.S.A 49:699-706 (1991); White, M. B. et al., Genomics 12:301-306 (1992); Grompe, M. et al., Proc. Natl. Acad. Sci. U.S.A 86:5855-5892 (1989); and Grompe, M. Nature Genetics 5:111-117 (1993), the disclosures of which are incorporated herein by reference in their entireties). Another method for determining the identity of the nucleotide present at a particular polymorphic site employs a specialized exonuclease-resistant nucleotide derivative as described in U.S. Pat. No. 4,656,127, the disclosure of which is incorporated herein by reference in its entirety. Further methods are described as follows.

[1282] The nucleotide present at a polymorphic site can be determined by sequencing methods. In a preferred embodiment, DNA samples are subjected to PCR amplification before sequencing as described above. DNA sequencing methods are described in “Sequencing Of Amplified Genomic DNA And Identification Of Single Nucleotide Polymorphisms”. Preferably, the amplified DNA is subjected to automated dideoxy terminator sequencing reactions using a dye-primer cycle sequencing protocol. Sequence analysis allows the identification of the base present at the biallelic marker site.

[1283] In microsequencing methods, the nucleotide at a polymorphic site in a target DNA is detected by a single nucleotide primer extension reaction. This method involves appropriate microsequencing primers which, hybridize just upstream of the polymorphic base of interest in the target nucleic acid. A polymerase is used to specifically extend the 3′ end of the primer with one single ddNTP (chain terminator) complementary to the nucleotide at the polymorphic site. Next the identity of the incorporated nucleotide is determined in any suitable way. Typically, microsequencing reactions are carried out using fluorescent ddNTPs and the extended microsequencing primers are analyzed by electrophoresis on ABI 377 sequencing machines to determine the identity of the incorporated nucleotide as described in EP 412 883, the disclosure of which is incorporated herein by reference in its entirety. Alternatively capillary electrophoresis can be used in order to process a higher number of assays simultaneously. Different approaches can be used for the labeling and detection of ddNTPs. A homogeneous phase detection method based on fluorescence resonance energy transfer has been described by Chen and Kwok (1997) and, Chen and Kwok (Nucleic Acids Research 25:347-353 1997) and Chen et al. (Proc. Natl. Acad. Sci. USA 94/20 10756-10761, 1997), the disclosures of which are incorporated herein by reference in their entireties). In this method, amplified genomic DNA fragments containing polymorphic sites are incubated with a 5′-fluorescein-labeled primer in the presence of allelic dye-labeled dideoxyribonucleoside triphosphates and a modified Taq polymerase. The dye-labeled primer is extended one base by the dye-terminator specific for the allele present on the template. At the end of the genotyping reaction, the fluorescence intensities of the two dyes in the reaction mixture are analyzed directly without separation or purification. All these steps can be performed in the same tube and the fluorescence changes can be monitored in real time. Alternatively, the extended primer may be analyzed by MALDI-TOF Mass Spectrometry. The base at the polymorphic site is identified by the mass added onto the microsequencing primer (see Haff and Smirnov, 1997, Genome Research, 7:378-388, 1997, the disclosure of which is incorporated herein by reference in its entirety). In another example, Pastinen et al., (Genome Research 7:606-614, 1997), the disclosure of which is incorporated herein by reference in its entirety) describe a method for multiplex detection of single nucleotide polymorphism in which the solid phase minisequencing principle is applied to an oligonucleotide array format. High-density arrays of DNA probes attached to a solid support (DNA chips) are further described below.

[1284] Other assays include mismatch detection assays, based on the specificity of polymerases and ligases. Polymerization reactions places particularly stringent requirements on correct base pairing of the 3′ end of the amplification primer and the joining of two oligonucleotides hybridized to a target DNA sequence is quite sensitive to mismatches close to the ligation site, especially at the 3′ end.

[1285] A preferred method of determining the identity of the nucleotide present at an allele involves nucleic acid hybridization. Any hybridization assay may be used including Southern hybridization, Northern hybridization, dot blot hybridization and solid-phase hybridization (see Sambrook et al., Molecular Cloning—A Laboratory Manual, Second Edition, Cold Spring Harbor Press, N.Y., 1989), the disclosure of which is incorporated herein by reference in its entirety). Hybridization refers to the formation of a duplex structure by two single stranded nucleic acids due to complementary base pairing. Hybridization can occur between exactly complementary nucleic acid strands or between nucleic acid strands that contain minor regions of mismatch. Specific probes can be designed that hybridize to one form of a biallelic marker and not to the other and therefore are able to discriminate between different allelic forms. Allele-specific probes are often used in pairs, one member of a pair showing perfect match to a target sequence containing the original allele and the other showing a perfect match to the target sequence containing the alternative allele. Hybridization conditions should be sufficiently stringent that there is a significant difference in hybridization intensity between alleles, and preferably an essentially binary response, whereby a probe hybridizes to only one of the alleles. Stringent, sequence specific hybridization conditions, under which a probe will hybridize only to the exactly complementary target sequence are well known in the art (Sambrook et al., 1989). The detection of hybrid duplexes can be carried out by a number of methods. Various detection assay formats are well known which utilize detectable labels bound to either the target or the probe to enable detection of the hybrid duplexes. Typically, hybridization duplexes are separated from unhybridized nucleic acids and the labels bound to the duplexes are then detected. Further, standard heterogeneous assay formats are suitable for detecting the hybrids using the labels present on the primers and probes. (see Landegren U. et al., Genome Research, 8:769-776, 1998, the disclosure of which is incorporated herein by reference in its entirety).

[1286] Hybridization assays based on oligonucleotide arrays rely on the differences in hybridization stability of short oligonucleotides to perfectly matched and mismatched target sequence variants. Efficient access to polymorphism information is obtained through a basic structure comprising high-density arrays of oligonucleotide probes attached to a solid support (e.g., the chip) at selected positions. Chips of various formats for use in detecting biallelic polymorphisms can be produced on a customized basis by Affymetrix (GeneChip), Hyseq (HyChip and HyGnostics), and Protogene Laboratories.

[1287] In general, these methods employ arrays of oligonucleotide probes that are complementary to target nucleic acid sequence segments from an individual which, target sequences include a polymorphic marker. EP 785280, the disclosure of which is incorporated herein by reference in its entirety, describes a tiling strategy for the detection of single nucleotide polymorphisms. Briefly, arrays may generally be “tiled” for a large number of specific polymorphisms, further described in PCT application No. WO 95/11995, the disclosure of which is incorporated herein by reference in its entirety. Upon completion of hybridization with the target sequence and washing of the array, the array is scanned to determine the position on the array to which the target sequence hybridizes. The hybridization data from the scanned array is then analyzed to identify which allele or alleles of the biallelic marker are present in the sample. Hybridization and scanning may be carried out as described in PCT application No. WO 92/10092 and WO 95/11995 and U.S. Pat. No. 5,424,186, the disclosures of which are incorporated herein by reference in their entireties. Solid supports and polynucleotides of the present invention attached to solid supports are further described in “Oligonucleotide Probes And Primers”.

### Detecting Chemokines

[1288] Some aspects of the present invention relate to the detection of chemokines by contacting a chemokine or a sample containing a chemokine with a THAP-type chemokine-binding agent. In some embodiments, the chemokines or the THAP-type chemokine-binding agents are labeled. Many labels and methods of conjugating such labels to a chemokine or a THAP-type chemokine-binding agent are known in the art. Additionally, labeled molecules, such as antibodies, which have an affinity for a THAP-type chemokine-binding agent can be used to detect the chemokine that is bound to a THAP-type chemokine-binding agent using a number of assay formats that are well known in the art.

[1289] An exemplary method for detecting the presence (quantitative or not) or absence of a chemokine, including, but not limited to, a chemokine in a biological sample, involves obtaining a chemokine or a sample containing a chemokine and contacting it with a compound or an agent capable of detecting the chemokine. In some embodiments, such an agent is a THAP-type chemokine-binding agent. Chemokines which can be detected using a method that employs a THAP-type chemokine-binding agent include, but are not limited to, XCL1, XCL2, CCL1, CCL2, CCL3, CCL3L1, SCYA3L2, CCL4, CCL4L, CCL5, CCL6, CCL7, CCL8, SCYA9, SCYA10, CCL11, SCYA12, CCL13, CCL14, CCL15, CCL16, CCL17, CCL18, CCL19, CCL20, CCL21, CCL22, CCL23, CCL24, CCL25, CCL26, CCL27, CCL28, clone 391, CARP CC-1, CCL1, CK-1, regakine-1, K203, CXCL1, CXCL1P, CXCL2, CXCL3, PF4, PF4V1, CXCL5, CXCL6, PPBP, SPBPBP, IL8, CXCL9, CXCL10, CXCL11, CXCL12, CXCL14, CXCL15, CXCL16, NAP-4, LFCA-1, Scyba, JSC, VHSV-induced protein, CX3CL1 and fCL1.

[1290] In some embodiments, the detection method comprises detecting, in a biological sample, such as a tissue or fluid sample from a subject (such as, a human patient), the presence or absence of a chemokine by contacting the biological sample with a THAP-type chemokine-binding agent and detecting a complex between the chemokine and the THAP-type chemokine-binding agent or detecting a THAP-type chemokine-binding agent which was previously bound to the chemokine but which has been released from the chemokine.

[1291] In some embodiments of the present invention, the THAP-type chemokine-binding agent is labeled directly. In other embodiments, the THAP-type chemokine-binding agent is detected using a labeled antibody having affinity for the THAP-type chemokine-binding agent. Such antibodies may directly carry the detectable label or be recognized by a labeled second antibody. Antibodies can be polyclonal, or more preferably, monoclonal. An intact antibody, or a fragment thereof (e.g., Fab or F(ab′)₂) can be used. The term “labeled”, with regard to the antibody or other detectable molecule, is intended to encompass direct labeling of the antibody or molecule by coupling (i.e., physically linking) a detectable substance to the antibody or molecule, as well as indirect labeling of the antibody or molecule by reactivity with another reagent that is directly labeled. Examples of indirect labeling include detection of a primary antibody using a fluorescently labeled secondary antibody and end-labeling of a THAP-type chemokine-binding agent with biotin such that it can be detected with fluorescently labeled streptavidin. The term “biological sample” is intended to include tissues, cells and biological fluids isolated from a subject, as well as tissues, cells and fluids present within a subject. Accordingly, the detection method can be used to detect a chemokine in a biological sample in vitro as well as in vivo. For example, in vitro techniques for detection of a chemokine include enzyme linked immunosorbent assays (ELISAs), Western blots, immunoprecipitations and immunofluorescence. In vivo techniques for detection of a chemokine include introducing into a subject a labeled THAP-type chemokine-binding agent. For example, the THAP-type chemokine-binding agent can be labeled with a radioactive marker whose presence and location in a subject can be detected by standard imaging techniques.

[1292] Other aspects of the present invention relate to a system for chemokine detection. Such a chemokine detection system comprises a THAP-type chemokine-binding agent bound to a solid support. A number of adequate solid support materials are known in the art and include, but are not limited to, cellulose, nylon or other polymer backings, plastics such as microtiter plates, synthetic beads and resins such as sepharose, glass, magnetic beads, latex particles, sheep (or other animal) red blood cells, duracytes and others. Suitable methods for immobilizing the THAP-type chemokine-binding agent to the solid support are well known in the art.

[1293] Some embodiments of the present invention relate to kits which comprise a THAP-type chemokine-binding agent and instructions which describe detecting or inhibiting chemokines with the THAP-type chemokine-binding agent. For example, the kit includes an ampule of THAP-type chemokine-binding agent that is stored so as to prevent damage or inactivation of the agent upon prolonged storage. Such methods can include, but are not limited to, lyophilization and freezing in an appropriate buffer. The kit also can contain chemokines to serve as a positive control sample when the kit is used for chemokine binding, detection or inhibition.

[1294] In some embodiments of the present invention, kits are packaged containing a heterogeneous mixture of THAP-type chemokine-binding agents, wherein each of the agents has a different affinity for one or more chemokines. Alternatively, some kits comprise a panel of THAP-type chemokine-binding agents, wherein each THAP-type chemokine binding agent has a different affinity for a particular chemokine. For example, the kit can comprise a panel of three THAP-type chemokine-binding agents, wherein the first agent has a high affinity for SLC but a low affinity for CXCL9, the second agent has a moderate affinity for both SLC and CXCL9, and the third agent has a low affinity for SLC and a high affinity for CXCL9. Panels of THAP-type chemokine-binding agents can be larger or small than that exemplified above and the number and types of chemokines that are detected can be more or less than that exemplified above. Kits containing such panels of THAP-type chemokine-binding agents can be used to reliably distinguish mixed samples of chemokines. Additionally, such panels can be used to bind or inhibit multiple different chemokines in a mixed chemokine sample.

[1295] Having generally described this invention, a further understanding can be obtained by reference to certain specific examples which are provided herein for purposes of illustration only, and are not intended to be limiting unless otherwise specified.

### EXAMPLES

### Example 1

### Isolation of the THAP1 cDNA in a Two-hybrid Screen with Chemokine SLC/CCL21

[1296] In an effort to define the function of novel HEVEC proteins and the cellular pathways involved, we used different baits to screen a two-hybrid cDNA library generated from microvascular human HEV endothelial cells (HEVEC). HEVEC were purified from human tonsils by immunomagnetic selection with monoclonal antibody MECA-79 as previously described (Girard and Springer (1995) Immunity 2:113-123). The SMART PCR cDNA library Construction Kit (Clontech, Palo Alto, Calif., USA) was first used to generate full-length cDNAs from 1 μg HEVEC total RNA. Oligo-dT-primed HEVEC cDNA were then digested with SfiI and directionally cloned into pGAD424-Sfi, a two-hybrid vector generated by inserting a SfiI linker (5′-GAATTCGGCCATTATGGCCTGCAGGATCCGGCCGCCTCGGCCCAGGATCC-3′) (SEQ ID NO: 181) between EcoRI and BamHI cloning sites of pGAD424 (Clontech). The resulting pGAD424-HEVEC cDNA two-hybrid library (mean insert size>1 kb, ˜3×10⁶ independant clones) was amplified in E. coli. To identify potential protein partners of chemokine SLC/6Ckine, screening of the two-hybrid HEVEC cDNA library was performed using as bait a cDNA encoding the mature form of human SLC/CCL21 (amino acids 24-134, GenBank Accession No: NP_{—}002980, SEQ ID NO: 182), amplified by PCR from HEVEC RNA with primers hSLC.5′ (5′-GCGGGATCCGTAGTGATGGAGGGGCTCAGGACTGTTG-3′) (SEQ ID NO: 183) and hSLC.3′ (5 ′-GCGGGATCCCTATGGCCCTTTAGGGGTCTGTGACC-3′) (SEQ ID NO: 184), digested with BamHI and inserted into the BamHI cloning site of MATCHMAKER two-hybrid system 2 vector pGBT9 (Clontech). Briefly, pGBT9-SLC was cotransformed with the pGAD424-HEVEC cDNA library in yeast strain Y190 (Clontech). 1.5×10⁷ yeast transformants were screened and positive protein interactions were selected by His auxotrophy. The plates were incubated at 30° C. for 5 days. Plasmid DNA was extracted from positive colonies and used to verify the specificity of the interaction by cotransformation in AH109 with pGBT9-SLC or control baits pGBT9, pGBT9-lamin. Eight independent clones isolated in this two-hybrid screen were characterized. They were found to correspond to a unique human cDNA encoding a novel human protein of 213 amino acids, designated THAP1, that exhibits 93% identity with its mouse orthologue (FIG. 1A). The only noticeable motifs in the THAP1 predicted protein sequence were a short proline-rich domain in the middle part and a consensus nuclear localization sequence (NLS) in the carboxy terminal part (FIG. 1B). Databases searches with the THAP1 sequence failed to reveal any significant similarity to previously characterized proteins with the exception of the first 90 amino acids that may define a novel protein motif associated with apoptosis, hereafter referred to as THAP domain (see FIG. 1B, FIGS. 9A-9C, and FIG. 10).

### Example 2

### Northern Blot

[1297] To determine the tissue distribution of THAP1 mRNA, we performed Northern blot analysis of 12 different adult human tissues (FIG. 2). Multiple Human Tissues Northern Blots (CLONTECH) were hydridized according to manufacturer's instructions. The probe was a PCR product corresponding to the THAP1 ORF, ³²P-labeled with the Prime-a-Gene Labeling System (PROMEGA). A 2.2-kb mRNA band was detected in brain, heart, skeletal muscle, kidney, liver, and placenta. In addition to the major 2.2 kb band, lower molecular weight bands were detected, that are likely to correspond to alternative splicing or polyadenylation of the THAP1 pre-mRNA. The presence of THAP1 mRNAs in many different tissues suggests that THAP1 has a widespread, although not ubiquitous, tissue distribution in the human body.

### Example 3

### Analysis of the Subcellular THAP1 Localization

[1298] To analyze the subcellular localization of the THAP1 protein, the THAP1 cDNA was fused to the coding sequence of GFP (Green Fluorescent Protein). The full-length coding region of THAP1 was amplified by PCR from HEVEC cDNA with primers 2HMR10 (5′-CCGAATTCAGGATGGTGCAGTCCTGCTCCGCCT-3′) (SEQ ID NO: 185) and 2HMR9 (5′-CGCGGATCCTGCTGGTACTTCAACTATTTCAAAGTAGTC-3′) (SEQ ID NO: 186), digested with EcoRI and BamHI, and cloned in frame downstream of the Enhanced Green Fluorescent Protein (EGFP) ORF in pEGFP.C2 vector (Clontech) to generate pEGFP.C2-THAP1. The GFP/THAP1 expression construct was then transfected into human primary endothelial cells from umbilical vein (HUVEC, PromoCell, Heidelberg, Germany). HUVEC were grown in complete ECGM medium (PromoCell, Heidelberg, Germany), plated on coverslips and transiently transfected in RPMI medium using GeneJammer transfection reagent according to manufacturer instructions (Stratagene, La Jolla, Calif., USA). Analysis by fluorescence microscopy 24 h later revealed that the GFP/THAP1 fusion protein localizes exclusively in the nucleus with both a diffuse distribution and an accumulation into speckles while GFP alone exhibits only a diffuse staining over the entire cell. To investigate the identity of the speckled domains with which GFP/THAP1 associates, we used indirect immunofluorescence microscopy to examine a possible colocalization of the nuclear dots containing GFP/THAP1 with known nuclear domains (replication factories, splicing centers, nuclear bodies).

[1299] Cells transfected with GFP-tagged expression constructs were allowed to grow for 24 h to 48 h on coverslips. Cells were washed twice with PBS, fixed for 15 min at room temperature in PBS containing 3.7% formaldehyde, and washed again with PBS prior to neutralization with 50 mM NH4Cl in PBS for 5 min at room temperature. Following one more PBS wash, cells were permeabilized 5 min at room temperature in PBS containing 0.1% Triton-X100, and washed again with PBS. Permeabilized cells were then blocked with PBS-BSA (PBS with 1% bovine serum albumin) for 10 min and then incubated 2 hr at room temperature with the following primary antibodies diluted in PBS-BSA: rabbit polyclonal antibodies against human Daxx (1/50, M-112, Santa Cruz Biotechnology) or mouse monoclonal antibodies anti-PML (mouse IgG1, 1/30, mAb PG-M3 from Dako, Glostrup, Denmark). Cells were then washed three times 5 min at room temperature in PBS-BSA, and incubated for 1 hr with Cy3 (red fluorescence)-conjugated goat anti-mouse or anti-rabbit IgG (1/1000, Amersham Pharmacia Biotech) secondary antibodies, diluted in PBS-BSA. After extensive washing in PBS, samples were air dried and mounted in Mowiol. Images were collected on a Leica confocal laser scanning microscope. The GFP (green) and Cy3 (red) fluorescence signals were recorded sequentially for identical image fields to avoid cross-talk between the channels.

[1300] This analysis revealed that GFP-THAP1 staining exhibits a complete overlap with the staining pattern obtained with antibodies directed against PML. The colocalization of GFP/THAP1 and PML was observed both in nuclei with few PML-NBs (less than ten) and in nuclei with a large number of PML-NBs. Indirect immunofluorescence staining with antibodies directed against Daxx, another well characterized component of PML-NBs, was performed to confirm the association of GFP/THAP1 with PML-NBs. We found a complete colocalization of GFP/THAP1 and Daxx in PML-NBs. Together, these results reveal that THAP1 is a novel protein associated with PML-NBs.

### Example 4

### Identification of Proteins Interacting with THAP1 in Human HEVECs: Two-hybrid Assay

[1301] THAP1 Forms a Complex with the Pro-apoptotic Protein PAR4

[1302] To identify potential protein partners of THAP1, screening of the two-hybrid HEVEC cDNA library was performed using as a bait the human THAP1 full length cDNA inserted into the MATCHMAKER two-hybrid system 3 vector pGBKT7 (Clontech). Briefly, the full-length coding region of THAP1 was amplified by PCR from HEVEC cDNA with primers 2HMR10 (5′-CCGAATTCAGGATGGTGCAGTCCTGCTCCGCCT-3′) (SEQ ID NO: 187) and 2HMR9 (5′-CGCGGATCCTGCTGGTACTTCAACTATTTCAAAGTAGTC-3′) (SEQ ID NO: 188), digested with EcoRI and BamHI, and cloned in frame downstream of the Gal4 Binding Domain (Gal4-BD) in pGBKT7 vector to generate pGBKT7-THAP1. pGBKT7-THAP1 was then cotransformed with the pGAD424-HEVEC cDNA library in yeast strain AH109 (Clontech). 1.5×10⁷ yeast transformants were screened and positive protein interactions were selected by His and Ade double auxotrophy according to manufacturer's instructions (MATCHMKER two-hybrid system 3, Clontech). The plates were incubated at 30° C. for 5 days. Plasmid DNA was extracted from these positive colonies and used to verify the specificity of the interaction by cotransformation in AH109 with pGBKT7-THAP1 or control baits pGBKT7, pGBKT7-lamin and pGBKT7-hevin. Three clones which specifically interacted with THAP1 were obtained in the screen; sequencing of these clones revealed three identical library plasmids that corresponded to a partial cDNA coding for the last 147 amino acids (positions 193-342) of the human pro-apoptotic protein PAR4 (FIG. 3A). Positive interaction between THAP1 and Par4 was confirmed using full length Par4 bait (pGBKT-Par4) and prey (pGADT7-Par4). Full-length human Par4 was amplified by PCR from human thymus cDNA (Clontech), with primers Par4.8 (5′-GCGGAATTCATGGCGACCGGTGGCTACCGGACC-3′) (SEQ ID NO: 189) and Par4.5 (5′-GCGGGATCCCTCTACCTGGTCAGCTGACCCACAAC-3′) (SEQ ID NO: 190), digested with EcoRI and BamHI, and cloned in pGBKT7 and pGADT7 vectors, to generate pGBKT7-Par4 and pGADT7-Par4. Positive interaction between THAP1 and Par4 was confirmed by cotransformation of AH109 with pGBKT7-THAP1 and pGADT7-Par4 or pGBKT7-Par4 and pGADT7-THAP1 and selection of transformants by His and Ade double auxotrophy according to manufacturer's instructions (MATCHMAKER two-hybrid system 3, Clontech). To generate pGADT7-THAP1, the full-length coding region of THAP1 was amplified by PCR from HEVEC cDNA with primers 2HMR10 (5′-CCGAATTCAGGATGGTGCAGTCCTGCTCCGCCT-3′) (SEQ ID NO: 191) and 2HMR9 (5′-CGCGGATCCTGCTGGTACTTCAACTATTTCAAAGTAGTC-3′) (SEQ ID NO: 192), digested with EcoRI and BamHI, and cloned in frame downstream of the Gal-4 Activation Domain (Gal4-AD) in pGADT7 two-hybrid vector (Clontech).

[1303] We then examined whether the leucine zipper/death domain at the C-terminus of Par4, previously shown to be involved in Par4 binding to WT-1 and aPKC, was required for the interaction between THAP1 and Par4. Two Par4 mutants were constructed for that purpose, Par4A and Par4DD. Par4A lacks the leucine zipper/death domain while Par4DD contains this domain. pGBKT7-Par4A(amino acids 1-276) and pGADT7-Par4A. were constructed by sub-cloning a EcoRI-BglII fragment from pGADT7-Par4 into the EcoRI and BamHI sites of pGBKT7 and pGADT7. Par4DD (amino acids 250-342) was amplified by PCR, using pGBKT7-Par4 as template, with primers Par4.4 (5′-CGCGAATTCGCCATCATGGGGTTCCCTAGATATAACAGGGATGCAA-3′) (SEQ ID NO: 193) and Par4.5, and cloned into the EcoRI and BamHI sites of pGBKT7 and pGADT7 to obtain pGBKT7-Par4DD and pGADT7-Par4DD. Two-hybrid interaction between THAP1 and Par4 mutants was tested by cotransformation of AH109 with pGBKT7-THAP1 and pGADT7-Par4A or pGADT7-Par4DD and selection of transformants by His and Ade double auxotrophy according to manufacturer's instructions (MATCHMAKER two-hybrid system 3, Clontech). We found that the Par4 leucine zipper/death domain (Par4DD) is not only required but also sufficient for the interaction with THAP1 (FIG. 3A). Similar results were obtained when two-hybrid experiments were performed in the opposite orientation using Par4 or Par4 mutants (Par4A and Par4DD) as baits instead of THAP1 (FIG. 3A).

### Example 5

### In Vitro THAP1/Par4 Interaction Assay

[1304] To confirm the interaction observed in yeast, we performed in vitro GST pull down assays. Par4DD, expressed as a GST-tagged fusion protein and immobilized on glutathione sepharose, was incubated with radiolabeled in vitro translated THAP1. To generate the GST-Par4DD expression vector, Par4DD (amino acids 250-342) was amplified by PCR with primers Par4.10 (5′-GCCGGATCCGGGTTCCCTAGATATAACAGGGATGCAA-3′) (SEQ ID NO: 194) and Par4.5, and cloned in frame downstream of the Glutathion S-Transferase ORF, into the BamHI site of the pGEX-2T prokaryotic expression vector (Amersham Pharmacia Biotech, Saclay, France). GST-Par4DD(amino acids 250-342) fusion protein encoded by plasmid pGEX-2T-Par4DD and control GST protein encoded by plasmid pGEX-2T, were then expressed in E. Coli DH5α and purified by affinity chromatography with glutathione sepharose according to supplier's instructions (Amersham Pharmacia Biotech). The yield of proteins used in GST pull-down assays was determined by SDS-Polyarylamide Gel Electrophoresis (PAGE) and Coomassie blue staining analysis. In vitro-translated THAP1 was generated with the TNT-coupled reticulocyte lysate system (Promega, Madison, Wis., USA) using pGBKT7-THAP1 vector as template. 25 μl of ³⁵S-labelled wild-type THAP1 was incubated with immobilized GST-Par4 or GST proteins overnight at 4° C., in the following binding buffer: 10 mM NaPO4 pH 8.0, 140 mM NaCl, 3 mM MgCl2, 1 mM dithiothreitol (DTT), 0.05% NP40, and 0.2 mM phenylmethyl sulphonyl fluoride (PMSF), 1 mM Na Vanadate, 50 mM β Glycerophosphate, 25 μg/ml chimotrypsine, 5 μg/ml aprotinin, 10 μg/ml Leupeptin. Beads were then washed 5 times in 1 ml binding buffer. Bound proteins were eluted with 2×Laemmli SDS-PAGE sample buffer, fractionated by 10% SDS-PAGE and visualized by fluorography using Amplify (Amersham Pharmacia Biotech). As expected, GST/Par4DD interacted with THAP1 (FIG. 3B). In contrast, THAP1 failed to interact with GST beads.

### Example 6

### In Vivo THAP1/Par4 Interaction Assay

[1305] To provide further evidence for a physiological interaction between THAP1 and Par4 in vivo interactions between THAP1 and PAR4 were investigated. For that purpose, confocal immunofluorescence microscopy was used to analyze the subcellular localization of epitope-tagged Par4DD in primary human endothelial cells transiently cotransfected with pEF-mycPar4DD eukaryotic expression vector and GFP or GFP-THAP1 expression vectors (pEGFP.C2 and pEGFP.C2-THAP1, respectively). To generate pEF-mycPar4DD, mycPar4DD (amino acids 250-342) was amplified by PCR using pGBKT7-Par4DD as template, with primers myc.BD7 (5′-GCGCTCTAGAGCCATCATGGAGGAGCAGAAGCTGATC-3′) (SEQ ID NO: 195) and Par4.9 (5′-CTTGCGGCCGCCTCTACCTGGTCAGCTGACCCACAAC-3′) (SEQ ID NO: 196), and cloned into the XbaI and NotI sites of the pEF-BOS expression vector (Mizushima and Nagata, Nucleic Acids Research, 18:5322, 1990). Primary human endothelial cells from umbilical vein (HUVEC, PromoCell, Heidelberg, Germany) were grown in complete ECGM medium (PromoCell, Heidelberg, Germany), plated on coverslips and transiently transfected in RPMI medium using GeneJammer transfection reagent according to manufacturer instructions (Stratagene, La Jolla, Calif., USA). Cells co-transfected with pEF-mycPar4DD and GFP-tagged expression constructs were allowed to grow for 24 h to 48 h on coverslips. Cells were washed twice with PBS, fixed for 15 min at room temperature in PBS containing 3.7% formaldehyde, and washed again with PBS prior to neutralization with 50 mM NH₄Cl in PBS for 5 min at room temperature. Following one more PBS wash, cells were permeabilized 5 min at room temperature in PBS containing 0.1% Triton-X100, and washed again with PBS. Permeabilized cells were then blocked with PBS-BSA (PBS with 1% bovine serum albumin) for 10 min and then incubated 2 hr at room temperature with mouse monoclonal antibody anti-myc epitope (mouse IgG1, 1/200, Clontech) diluted in PBS-BSA. Cells were then washed three times 5 min at room temperature in PBS-BSA, and incubated for 1 hr with Cy3 (red fluorescence)-conjugated goat anti-mouse (1/1000, Amersham Pharmacia Biotech) secondary antibodies, diluted in PBS-BSA. After extensive washing in PBS, samples were air dried and mounted in Mowiol. Images were collected on a Leica confocal laser scanning microscope. The GFP (green) and Cy3 (red) fluorescence signals were recorded sequentially for identical image fields to avoid cross-talk between the channels.

[1306] In cells transiently co-transfected with pEF-mycPar4DD and GFP expression vector, ectopically expressed myc-Par4DD was found to accumulate both in the cytoplasm and the nucleus of the majority of the cells. In contrast, transient cotransfection of pEF-mycPar4DD and GFP-THAP1 expression vectors dramatically shifted myc-Par4DD from a diffuse cytosolic and nuclear localization to a preferential association with PML-NBs. The effect of GFP-THAP1 on myc-Par4DD localization was specific since it was not observed with GFP-APS kinase-1 (APSK-1), a nuclear enzyme unrelated to THAP1 and apoptosis [Besset et al., Faseb J, 14:345-354, 2000]. This later result shows that GFP-THAP1 recruits myc-Par4DD at PML-NBs and provides in vivo evidence for a direct interaction of THAP1 with the pro-apoptotic protein Par4.

### Example 7

### Identification of a Novel Arginine-rich Par4 Binding Motif

[1307] To identify the sequences mediating THAP1 binding to Par4, a series of THAP1 deletion constructs was generated. Both amino-terminal (THAP1-C1, -C2, -C3) and carboxy-terminal (THAP1-N1, -N2, -N3) deletion mutants (FIG. 4A) were amplified by PCR using plasmid pEGFP.C2-THAP1 as a template and the following primers:

| | |
|---|---|
| 2HMR12 | |
| (5′-GCGGAATTCAAAGAAGATCTTCTGGAGCCACAGGAAC-3′) | (SEQ ID NO: 197) |
| and | |
| 2HMR9 | |
| (5′-CGCGGATCCTGCTGGTACTTCAACTATTTCAAAGTAGTC-3′) | (SEQ ID NO: 198) |
| for THAP1-C1 (amino acids 90-213); | |
| PAPM2 | |
| (5′-GCGGAATTCATGCCGCCTCTTCAGACCCCTGTTAA-3′) | (SEQ ID NO: 199) |
| and | |
| 2HMR9 for THAP1-C2 (amino acids 120-213); | |
| PAPM3 | |
| (5′-GCGGAATTCATGCACCAGCGGAAAAGGATTCATCAG-3′) | (SEQ ID NO: 200) |
| and | |
| 2HMR9 for THAP1-C3 (amino acids 143-213); | |
| 2HMR10 | |
| (5′-CCGAATTCAGGATGGTGCAGTCCTGCTCCGCCT-3′) | (SEQ ID NO: 201) |
| and | |
| 2HMR17 | |
| (5′-GCGGGATCCCTTGTCATGTGGCTCAGTACAAAGAAATAT-3′) | (SEQ ID NO: 202) |
| for THAP1-N1 (amino acids 1-90); | |
| 2HMR10 and PAPN2 | |
| (5′-CGGGATCCTGTGCGGTCTTGAGCTTCTTTCTGAG-3′) | (SEQ ID NO: 203) |
| for THAP1-N2 (amino acids 1-166); | |
| and | |
| 2HMR10 and PAPN3 | |
| (5′-GCGGGATCCGTCGTCTTTCTCTTTCTGGAAGTGAAC-3′) | (SEQ ID NO: 204) |
| for THAP1-N3 (amino acids 1-192). | |

[1308] The PCR fragments, thus obtained, were digested with EcoRI and BamHI, and cloned in frame downstream of the Gal4 Binding Domain (Gal4-BD) in pGBKT7 two-hybrid vector (Clontech) to generate pGBKT7-THAP1-C1, -C2, -C3, -N1, -N2 or -N3, or downstream of the Enhanced Green Fluorescent Protein (EGFP) ORF in pEGFP.C2 vector (Clontech) to generate pEGFP.C2-THAP1-C1, -C2, -C3, -N1, -N2 or -N3.

[1309] Two-hybrid interaction between THAP1 mutants and Par4DD was tested by cotransformation of AH109 with pGBKT7-THAP1-C1, -C2, -C3, -N1, -N2 or -N3 and pGADT7-Par4DD and selection of transformants by His and Ade double auxotrophy according to manufacturer's instructions (MATCHMAKER two-hybrid system 3, Clontech). Positive two-hybrid interaction with Par4DD was observed with mutants THAP1-C1, -C2, -C3, -and -N3 but not with mutants THAP1-N1 and -N2, suggesting the Par4 binding site is found between THAP1 residues 143 and 192.

[1310] THAP1 mutants were also tested in the in vitro THAP1/Par4 interaction assay. In vitro-translated THAP1 mutants were generated with the TNT-coupled reticulocyte lysate system (Promega, Madison, Wis., USA) using pGBKT7-THAP1-C1, -C2, -C3, -N1, -N2 or -N3 vector as template. 25 μl of each ³⁵S-labelled THAP1 mutant was incubated with immobilized GST or GST-Par4 protein overnight at 4° C., in the following binding buffer: 10 mM NaPO4 pH 8.0, 140 mM NaCl, 3 mM MgCl2, 1 mM dithiothreitol (DTT), 0.05% NP40, and 0.2 mM phenylmethyl sulphonyl fluoride (PMSF), 1 mM Na Vanadate, 50 mM β Glycerophosphate, 25 μg/ml chimotrypsine, 5 μg/ml aprotinin, 10 μg/ml Leupeptin. Beads were then washed 5 times in 1 ml binding buffer. Bound proteins were eluted with 2×Laemmli SDS-PAGE sample buffer, fractionated by 10% SDS-PAGE and visualized by fluorography using Amplify (Amersham Pharmacia Biotech). As expected, THAP1-C1, -C2, -C3, -and -N3 interacted with GST/Par4DD (FIG. 4B). In contrast, THAP1-N1 and -N2 failed to interact with GST/Par4DD beads.

[1311] Finally, Par4 binding activity of THAP1 mutants was also analyzed by the in vivo THAP1/Par4 interaction assay as described in Example 6 using pEF-mycPar4DD and pEGFP.C2-THAP1-C1, -C2, -C3, -N1, -N2 or -N3 expression vectors.

[1312] Essentially identical results were obtained with the three THAP1/Par4 interactions assays (FIG. 4A). That is, the Par4 binding site was found between residues 143 and 192 of human THAP1. Comparison of this region with the Par4 binding domain of mouse ZIP kinase, another Par4-interacting protein, revealed the existence of a conserved arginine rich-sequence motif (SEQ ID NOs: 205, 263 and 15), that may correspond to the Par4 binding site (FIG. 5A). Mutations in this arginine rich-sequence motif were generated by site directed mutagenesis. These two novel THAP1 mutants, THAP1 RR/AA (replacement of residues R171A and R172A) and THAP1ΔQRCRR (deletion of residues 168-172), were generated by two successive rounds of PCR using pEGFP.C2-THAP1 as template and primers 2HMR10 and 2HMR9 together with primers

| | |
|---|---|
| RR/AA-1 | |
| (5′-CCGCACAGCAGCGATGCGCTGCTCAAGAACGGCAGCTTG-3′) | (SEQ ID NO: 206) |
| and | |
| RR/AA-2 | |
| (5′-CAAGCTGCCGTTCTTGAGCAGCGCATCGCTGCTGTGCGG-3′) | (SEQ ID NO: 207) |
| for mutant THAP1 RR/AA or primers | |
| ΔRR-1 | |
| (5′-GCTCAAGACCGCACAGCAAGAACGGCAGCTTG-3′ | (SEQ ID NO: 208) |
| and | |
| ΔRR-2 | |
| (5′-CAAGCTGCCGTTCTTGCTGTGCGGTCTTGAGC-3′) | (SEQ ID NO: 209) |

[1313] for mutant THAP1ΔQRCRR. The resulting PCR fragments were digested with EcoRI and BamHI, and cloned in frame downstream of the Gal4 Binding Domain (Gal4-BD) in pGBKT7 two-hybrid vector (Clontech) to generate pGBKT7-THAP1-RR/AA and −Δ(QRCRR), or downstream of the Enhanced Green Fluorescent Protein (EGFP) ORF in pEGFP.C2 vector (Clontech) to generate pEGFP.C2-THAP1-RR/AA and −Δ(QRCRR). THAP1 RR/AA and THAP1ΔQRCRR THAP1 mutants were then tested in the three THAP1/Par4 interaction assays (two-hybrid assay, in vitro THAP1/Par4 interaction assay, in vivo THAP1/Par4 interaction assay) as described above for the THAP1-C1, -C2, -C3, -N1, -N2 or -N3 mutants. This analysis revealed that the two mutants were deficient for interaction with Par4 in all three assays (FIG. 5B), indicating that the novel arginine-rich sequence motif, we have identified, is a novel Par4 binding motif.

### Example 8

### PAR4 is a Novel Component of PML-NBs that Colocalizes with THAP1 in Vivo

[1314] We then wished to determine if PAR4 colocalizes with THAP1 in vivo in order to provide further evidence for a physiological interaction between THAP1 and PAR4. We first analyzed Par4 subcellular localization in primary human endothelial cells. Confocal immunofluorescence microscopy using affinity-purified anti-PAR4 antibodies (Sells et al., 1997; Guo et al ; 1998) was performed on HUVEC endothelial cells fixed with methanol/acetone, which makes PML-NBs components accessible for antibodies (Stemsdorf et al., 1997). Cells were fixed in methanol for 5 min at −20° C., followed by incubation in cold acetone at −20° C. for 30 sec. Permeabilized cells were then blocked with PBS-BSA (PBS with 1% bovine serum albumin) for 10 min and then incubated 2 hr at room temperature with rabbit polyclonal antibodies against human Par4 (1/50, R-334, Santa Cruz Biotechnology, Santa Cruz, Calif., USA) and mouse monoclonal antibody anti-PML (mouse IgG1, 1/30, mAb PG-M3 from Dako, Glostrup, Denmark). Cells were then washed three times 5 min at room temperature in PBS-BSA, and incubated for 1 hr with Cy3 (red fluorescence)-conjugated goat anti-rabbit IgG (1/1000, Amersham Pharmacia Biotech) and FITC-labeled goat anti-mouse-IgG (1/40, Zymed Laboratories Inc., San Francisco, Calif., USA) secondary antibodies, diluted in PBS-BSA. After extensive washing in PBS, samples were air dried and mounted in Mowiol. Images were collected on a Leica confocal laser scanning microscope. The FITC (green) and Cy3 (red) fluorescence signals were recorded sequentially for identical image fields to avoid cross-talk between the channels. This analysis showed an association of PAR4 immunoreactivity with nuclear dot-like structures, in addition to diffuse nucleoplasmic and cytoplasmic staining. Double immunostaining with anti-PML antibodies, revealed that the PAR4 foci colocalize perfectly with PML-NBs in cell nuclei. Colocalization of Par4 with GFP-THAP1 in PML-NBs was analyzed in transfected HUVEC cells expressing ectopic GFP-THAP1. HUVEC were grown in complete ECGM medium (PromoCell, Heidelberg, Germany), plated on coverslips and transiently transfected with GFP/THAP1 expression construct (pEGFP.C2-THAP1) in RPMI medium using GeneJammer transfection reagent according to manufacturer instructions (Stratagene, La Jolla, Calif., USA). Analysis of transfected cells by indirect immunofluorescence microscopy 24 h later, with anti-Par4 rabbit antibodies, revealed that all endogenous PAR4 foci colocalize with ectopic GFP-THAP1 in PML-NBs further confirming the association of the THAP1/PAR4 complex with PML-NBs in vivo.

### Example 9

### PML Recruits the THAP1/PAR4 Complex to PML-NBs

[1315] Since it has been shown that PML plays a critical role in the assembly of PML-NBs by recruiting other components, we next wanted to determine whether PML plays a role in the recruitment of the THAP1/PAR4 complex to PML-NBs. For this purpose, we made use of the observation that both endogenous PAR4 and ectopic GFP-THAP1 do not accumulate in PML-NBs in human Hela cells. Expression vectors for GFP-THAP1 and HA-PML (or HA-SP100) were cotransfected into these cells and the localization of endogenous PAR4, GFP-THAP1 and HA-PML (or HA-SP100) was analyzed by triple staining confocal microscopy.

[1316] Human Hela cells (ATCC) were grown in Dulbecco's Modified Eagle's Medium supplemented with 10% Fetal Calf Serum and 1% Penicillin-streptomycin (all from Life Technologies, Grand Island, N.Y., USA), plated on coverslips, and transiently transfected with calcium phosphate method using 2 μg pEGFP.C2-THAP1 and pcDNA.3-HA-PML3 or pSG5-HA-Sp100 (a gift from Dr Dejean, Institut Pasteur, Paris, France) plasmid DNA. pcDNA.3-HA-PML3 was constructed by sub-cloning a BglII-BamHI fragment from pGADT7-HA-PML3 into the BamHI site of pcDNA3 expression vector (Invitrogen, San Diego, Calif., USA). To generate pGADT7-HA-PML3, PML3 ORF was amplified by PCR, using pACT2-PML3 (a gift from Dr De The, Paris, France) as template, with primers

[1317] PML-1 (5′-GCGGGATCCCTAAATTAGAAAGGGGTGGGGGTAGCC-3′) (SEQ ID NO: 210) and

[1318] PML-2 (5′-GCGGAATTCATGGAGCCTGCACCCGCCCGATC-3′) (SEQ ID NO: 211), and cloned into the EcoRI and BamHI sites of pGADT7.

[1319] Hela cells transfected with GFP-tagged and HA-tagged expression constructs were allowed to grow for 24 h to 48 h on coverslips. Cells were washed twice with PBS, fixed in methanol for 5 min at −20° C., followed by incubation in cold acetone at −20° C. for 30 sec. Permeabilized cells were then blocked with PBS-BSA (PBS with 1% bovine serum albumin) for 10 min and then incubated 2 hr at room temperature with the following primary antibodies diluted in PBS-BSA: rabbit polyclonal antibodies against human Par4 (1/50, R-334, Santa Cruz Biotechnology, Santa Cruz, Calif., USA) and mouse monoclonal antibody anti-HA tag (mouse IgG1, 1/1000, mAb 16B12 from BabCO, Richmond, Calif., USA). Cells were then washed three times 5 min at room temperature in PBS-BSA, and incubated for 1 hr with Cy3 (red fluorescence)-conjugated goat anti-rabbit IgG (1/1000, Amersham Pharmacia Biotech) and Alexa Fluor-633 (blue fluorescence) goat anti-mouse IgG conjugate (1/100, Molecular Probes, Eugene, Oreg., USA) secondary antibodies, diluted in PBS-BSA. After extensive washing in PBS, samples were air dried and mounted in Mowiol. Images were collected on a Leica confocal laser scanning microscope. The GFP (green), Cy3 (red) and Alexa 633 (blue) fluorescence signals were recorded sequentially for identical image fields to avoid cross-talk between the channels.

[1320] In Hela cells transfected with HA-PML, endogenous PAR4 and GFP-THAP1 were recruited to PML-NBs, whereas in cells transfected with HA-SP100, both PAR4 and GFP-THAP1 exhibited diffuse staining without accumulation in PML-NBs. These findings indicate that recruitment of the THAP1/PAR4 complex to PML-NBs depends on PML but not SP100.

### Example 10

### THAP1 is an Apoptosis Inducing Polypeptide

[1321] THAP1 is a Novel Proapoptotic Factor

[1322] Since PML and PML-NBs have been linked to regulation of cell death and PAR4 is a well established pro-apoptotic factor, we examined whether THAP1 can modulate cell survival. Mouse 3T3 cells, which have previously been used to analyze the pro-apoptotic activity of PAR4 (Diaz-Meco et al, 1996; Berra et al., 1997), were transfected with expression vectors for GFP-THAP1, GFP-PAR4 and as a negative control GFP-APS kinase-1 (APSK-1), a nuclear enzyme unrelated to THAP1 and apoptosis (Girard et al., 1998; Besset et al., 2000). We then determined whether ectopic expression of THAP1 enhances the apoptotic response to serum withdrawal. Transfected cells were deprived of serum for up to twenty four hours and cells with apoptotic nuclei, as revealed by DAPI staining and in situ TUNEL assay, were counted.

[1323] Cell death assays: Mouse 3T3-TO fibroblasts were seeded on coverslips in 12-well plates at 40 to 50% confluency and transiently transfected with GFP or GFP-fusion protein expression vectors using Lipofectamine Plus reagent (Life Technologies) according to supplier's instructions. After 6 h at 37° C., the DNA-lipid mixture was removed and the cells were allowed to recover in complete medium for 24 h. Serum starvation of transiently transfected cells was induced by changing the medium to 0% serum, and the amount of GFP-positive apoptotic cells was assessed 24 h after induction of serum starvation. Cells were fixed in PBS containing 3.7% formaldehyde and permeabilized with 0.1% Triton-X100 as described under immunofluorescence, and apoptosis was scored by in situ TUNEL (terminal deoxynucleotidyl transferase-mediated dUTP nick end labeling) and/or DAPI (4,6-Diamidino-2-phenylindole) staining of apoptotic nuclei exhibiting nuclear condensation. The TUNEL reaction was performed for 1 hr at 37° C. using the in situ cell death detection kit, TMR red (Roche Diagnostics, Meylan, France). DAPI staining with a final concentration of 0.2 μg/ml was performed for 10 min at room temperature. At least 100 cells were scored for each experimental point using a fluorescence microscope.

[1324] Basal levels of apoptosis in the presence of serum ranged from 1-3%. Twenty four hours after serum withdrawal, apoptosis was found in 18% of untransfected 3T3 cells and in 3T3 cells overexpressing GFP-APSK-1. Levels of serum withdrawal induced apoptosis were significantly increased to about 70% and 65% in cells overexpressing GFP-PAR4 and GFP-THAP1, respectively (FIG. 6A). These results demonstrate that THAP1, similarly to PAR4, is an apoptosis inducing polypeptide.

[1325] TNFα-induced apoptosis assays were performed by incubating transiently transfected cells in complete medium containing 30 ng/ml of mTNFα (R & D, Minneapolis, Minn., USA) for 24 h. Apoptosis was scored as described for serum withdrawal-induced apoptosis. The results are shown in FIG. 6B. As shown in FIG. 6B, THAP1 induced apoptosis.

### Example 11

### The THAP Domain is Essential for THAP1 Pro-apoptotic Activity

[1326] To determine the role of the amino-terminal THAP domain (amino acids 1 to 89) in the functional activity of THAP1, we generated a THAP1 mutant that is deleted of the THAP domain (THAP1ΔTHAP). THAP1ΔTHAP (amino acids 90-213) was amplified by PCR, using pEGFP.C2-THAP1 as template, with primers 2HMR12 (5′-GCGGAATTCAAAGAAGATCTTCTGGAGCCACAGGAAC-3′) (SEQ ID NO: 212) and 2HMR9 (5′-CGCGGATCCTGCTGGTACTTCAACTATTTCAAAGTAGTC-3′) (SEQ ID NO: 213), digested with EcoRI and BamHI, and cloned in pGBKT7 and pEGFP-C2 vectors, to generate pGBKT7-THAP1ΔTHAP and pEGFP.C2-THAP1ΔTHAP expression vectors. The role of the THAP domain in PML NBs localization, binding to Par4, or pro-apoptotic activity of THAP1 was then analyzed.

[1327] To analyze the subcellular localization of THAP1ΔTHAP, the GFP/THAP1ΔTHAP expression construct was transfected into human primary endothelial cells from umbilical vein (HUVEC, PromoCell, Heidelberg, Germany). HUVEC were grown in complete ECGM medium (PromoCell, Heidelberg, Germany), plated on coverslips and transiently transfected in RPMI medium using GeneJammer transfection reagent according to manufacturer instructions (Stratagene, La Jolla, Calif., USA). Transfected cells were allowed to grow for 48 h on coverslips. Cells were then washed twice with PBS, fixed for 15 min at room temperature in PBS containing 3.7% formaldehyde, and washed again with PBS prior to neutralization with 50 mM NH₄Cl in PBS for 5 min at room temperature. Following one more PBS wash, cells were permeabilized 5 min at room temperature in PBS containing 0.1% Triton-X100, and washed again with PBS. Permeabilized cells were then blocked with PBS-BSA (PBS with 1% bovine serum albumin) for 10′ and then incubated 2 hr at room temperature with mouse monoclonal antibody anti-PML (mouse IgG1, 1/30, mAb PG-M3 from Dako, Glostrup, Denmark) diluted in PBS-BSA. Cells were then washed three times 5 min at room temperature in PBS-BSA, and incubated for 1 hr with Cy3 (red fluorescence)-conjugated goat anti-mouse IgG (1/1000, Amersham Pharmacia Biotech) secondary antibodies, diluted in PBS-BSA. After extensive washing in PBS, samples were air dried and mounted in Mowiol. Images were collected on a Leica confocal laser scanning microscope. The GFP (green) and Cy3 (red) fluorescence signals were recorded sequentially for identical image fields to avoid cross-talk between the channels.

[1328] This analysis revealed that GFP-THAP1ΔTHAP staining exhibits a complete overlap with the staining pattern obtained with antibodies directed against PML, indicating the THAP domain is not required for THAP1 localization to PML NBs.

[1329] To examine the role of the THAP domain in binding to Par4, we performed in vitro GST pull down assays. Par4DD, expressed as a GST-tagged fusion protein and immobilized on glutathione sepharose, was incubated with radiolabeled in vitro translated THAP1ΔTHAP. In vitro-translated THAP1ΔTHAP was generated with the TNT-coupled reticulocyte lysate system (Promega, Madison, Wis., USA) using pGBKT7-THAP1ΔTHAP vector as template. 25 μl of ³⁵S-labelled THAP1≢ΔTHAP was incubated with immobilized GST-Par4 or GST proteins overnight at 4° C., in the following binding buffer: 10 mM NaPO4 pH 8.0, 140 mM NaCl, 3 mM MgCl2, 1 mM dithiothreitol (DTT), 0.05% NP40, and 0.2 mM phenylmethyl sulphonyl fluoride (PMSF), 1 mM Na Vanadate, 50 mM β Glycerophosphate, 25 μg/ml chimotrypsine, 5 μg/ml aprotinin, 10 μg/ml Leupeptin. Beads were then washed 5 times in 1 ml binding buffer. Bound proteins were eluted with 2×Laemmli SDS-PAGE sample buffer, fractionated by 10% SDS-PAGE and visualized by fluorography using Amplify (Amersham Pharmacia Biotech).

[1330] This analysis revealed that THAP1ΔTHAP interacts with GST/Par4DD, indicating that the THAP domain is not involved in THAP1/Par4 interaction (FIG. 7A).

[1331] To examine the role of the THAP domain in THAP1 pro-apoptotic activity, we performed cell death assays in mouse 3T3 cells. Mouse 3T3-TO fibroblasts were seeded on coverslips in 12-well plates at 40 to 50% confluency and transiently transfected with GFP-APSK1, GFP-THAP1 or GFP-THAP1ΔTHAP fusion proteins expression vectors using Lipofectamine Plus reagent (Life Technologies) according to supplier's instructions. After 6 h at 37° C., the DNA-lipid mixture was removed and the cells were allowed to recover in complete medium for 24 h. Serum starvation of transiently transfected cells was induced by changing the medium to 0% serum, and the amount of GFP-positive apoptotic cells was assessed 24 h after induction of serum starvation. Cells were fixed in PBS containing 3.7% formaldehyde and permeabilized with 0.1% Triton-X100 as described under immunofluorescence, and apoptosis was scored by in situ TUNEL (terminal deoxynucleotidyl transferase-mediated dUTP nick end labeling) and/or DAPI (4,6-Diamidino-2-phenylindole) staining of apoptotic nuclei exhibiting nuclear condensation. The TUNEL reaction was performed for 1 hr at 37° C. using the in situ cell death detection kit, TMR red (Roche Diagnostics, Meylan, France). DAPI staining with a final concentration of 0.2 μg/ml was performed for 10 min at room temperature. At least 100 cells were scored for each experimental point using a fluorescence microscope.

[1332] Twenty four hours after serum withdrawal, apoptosis was found in 18% of untransfected 3T3 cells and in 3T3 cells overexpressing GFP-APSK-1. Levels of serum withdrawal induced apoptosis were significantly increased to about 70% in cells overexpressing GFP-THAP1. Deletion of the THAP domain abrogated most of this effect since serum-withdrawal-induced apoptosis was reduced to 28% in cells overexpressing GFP-THAP1ΔTHAP (FIG. 7B). These results indicate that the THAP domain, although not required for THAP1 PML-NBs localization and Par4 binding, is essential for THAP1 pro-apoptotic activity.

### Example 12

### The THAP Domain Defines a Novel Family of Proteins, the THAP Family

[1333] To discover novel human proteins homologous to THAP1 and/or containing THAP domains, GenBank non-redundant, human EST and draft human genome databases at the National Center for Biotechnology Information (www.ncbi.nlm.nih.gov) were searched with both the nucleotide and amino acid sequences of THAP1, using the programs BLASTN, TBLASTN and BLASTP (Altschul, S. F., Gish, W., Miller, W., Myers, E. W.and Lipman, D. J. (1990). Basic local alignment search tool. J Mol Biol 215: 403-410). This initial step enabled us to identify 12, distinct human THAP-containing, proteins (hTHAP0 to hTHAP11; FIG. 8). In the case of the partial length sequences, assembly of overlapping ESTs together with GENESCAN (Burge, C. and Karlin, S. (1997). Prediction of complete gene structures in human genomic DNA. J Mol Biol 268: 78-94) and GENEWISE (Jareborg, N., Bimey, E. and Durbin, R. (1999). Comparative analysis of noncoding regions of 77 orthologous mouse and human gene pairs. Genome Res 9: 815-824) gene predictions on the corresponding genomic DNA clones, was used to define the full length human THAP proteins as well as their corresponding cDNAs and genes. CLUSTALW (Higgins, D. G., Thompson, J. D. and Gibson, T. J. (1996). Using CLUSTAL for multiple sequence alignments. Methods Enzymol 266: 383-402) was used to carry out the alignment of the 12 human THAP domains with the DNA binding domain of Drosophila P-element transposase (Lee, C. C., Beall, E. L., and Rio, D. C. (1998) Embo J. 17:4166-74), which was colored using the computer program Boxshade (www.ch.embnet.org/software/BOX_form.html) (see FIGS. 9A and 9B). Equivalent approach to the one described above was used in order to identify the mouse, rat, pig, and various other orthologs of the human THAP proteins (FIG. 9C). Altogether, the in silico and experimental approaches led to the discovery of 12 distinct human members (hTHAP0 to hTHAP11) of the THAP family of pro-apoptotic factors (FIG. 8).

### Example 13

### THAP2 and THAP3 Interact with Par-4

[1334] To assess whether THAP2 and THAP3 are able to interact with Par-4, yeast two hybrid assays using Par-4 wild type bait (FIG. 10B) and in vitro GST pull down assays (FIG. 10C), were performed as described above (Examples 4 and 5). As shown in FIGS. 10 and 10C, THAP2 and THAP3 are able to interact with Par-4. A sequence alignment showing the comparison of the THAP domain and the PAR4-binding domain between THAP1, THAP2 and THAP3 is shown in FIG. 10A.

### Example 14

### THAP2 and THAP3 are Able to Induce Apoptosis

[1335] Serum-induced or TNFα apoptosis analyses were performed as described above (Example 10) in cells transfected with GFP-APSK1, GFP-THAP2 or GFP-THAP3 expression vectors. Apoptosis was quantified by DAPI staining of apoptotic nuclei 24 hours after serum withdrawal or addition of TNFα. The results are shown in FIG. 11A (serum withdrawal) and FIG. 11B (TNFα). These results indicate that, THAP-2 and THAP3 induce apoptosis.

### Example 15

### Identification of the SLC/CCL21 Chemokine-binding Domain of Human THAP1

[1336] To identify the SLC/CCL21 chemokine-binding domain of human THAP1, a series of THAP1 deletion constructs was generated as described in Example 7.

[1337] Two-hybrid interaction between THAP1 mutants and chemokine SLC/CCL21 was tested by cotransformation of AH109 with pGADT7-THAP1-C1, -C2, -C3, -N1, -N2 or -N3 and pGBKT7-SLC/CCL21 and selection of transformants by His and Ade double auxotrophy according to manufacturer's instructions (MATCHMAKER two-hybrid system 3, Clontech). pGBKT7-SLC/CCL21 vector was generated by subcloning the BamHI SLC/CCL21 fragment from pGBT9-SLC (see example 1) into the unique BamHI cloning site of vector pGBKT7 (Clontech). Positive two-hybrid interaction with chemokine SLC/CCL21 was observed with mutants THAP1-C1, -C2, -C3, but not with mutants THAP1-N1, -N2 and -N3, suggesting that the SLC/CCL21 chemokine-binding domain of human THAP1 is found between THAP1 residues 143 and 213 (FIG. 12).

### Example 16

### In Vitro THAP1/chemokine SLC-CCL21 Interaction Assay

[1338] To confirm the interaction observed in yeast two-hybrid system, we performed in vitro GST pull down assays. THAP1, expressed as a GST-tagged fusion protein and immobilized on glutathione sepharose, was incubated with radiolabeled in vitro translated SLC/CCL21.

[1339] To generate the GST-THAP1 expression vector, the full-length coding region of THAP1 (amino acids 1-213) was amplified by PCR from HEVEC cDNA with primers 2HMR8 (5′-CGCGGATCCGTGCAGTCCTGCTCCGCCTACGGC-3′) (SEQ ID NO: 214) and 2HMR11 (5′-CCGAATTCTTATGCTGGTACTTCAACTATTTCAAAGTAG-3′) (SEQ ID NO: 215), digested with BamHI and EcoRI, and cloned in frame downstream of the Glutathion S-Transferase ORF, between the BamHI and EcoRI sites of the pGEX-2T prokaryotic expression vector (Amersham Pharmacia Biotech, Saclay, France). GST-THAP1 fusion protein encoded by plasmid pGEX-2T-THAP1 and control GST protein encoded by plasmid pGEX-2T, were then expressed in E. Coli DH5α and purified by affinity chromatography with glutathione sepharose according to supplier's instructions (Amersham Pharmacia Biotech). The yield of proteins used in GST pull-down assays was determined by SDS-Polyarylamide Gel Electrophoresis (PAGE) and Coomassie blue staining analysis.

[1340] In vitro-translated SLC/CCL21 was generated with the TNT-coupled reticulocyte lysate system (Promega, Madison, Wis., USA) using as template pGBKT7-SLC/CCL21 vector (see Example 15). 25 μl of ³⁵S-labelled wild-type SLC/CCL21 was incubated with immobilized GST-THAP1 or GST proteins overnight at 4° C., in the following binding buffer: 10 mM NaPO4 pH 8.0, 140 mM NaCl, 3 mM MgCl2, 1 mM dithiothreitol (DTT), 0.05% NP40, and 0.2 mM phenylmethyl sulphonyl fluoride (PMSF), 1 mM Na Vanadate, 50 mM P Glycerophosphate, 25 μg/ml chimotrypsine, 5 μg/ml aprotinin, 10 μg/ml Leupeptin. Beads were then washed 5 times in 1 ml binding buffer. Bound proteins were eluted with 2×Laemmli SDS-PAGE sample buffer, fractionated by 10% SDS-PAGE and visualized by fluorography using Amplify (Amersham Pharmacia Biotech). As expected, GST/THAP1 interacted with SLC/CCL21 (FIG. 13). In contrast, SLC/CCL21 failed to interact with GST beads.

### Example 17

### Identification of the THAP1 -binding Domain of Human Chemokine SLC/CCL21

[1341] To determine the THAP1-binding site on human chemokine SLC/CCL21, a SLC/CCL21 deletion mutant (SLC/CCL21ΔCOOH) lacking the SLC-specific basic carboxy-terminal extension (amino acids 102-134; GenBank Accession Number NP_{—}002980) was generated. This SLC/CCL21ΔCOOH mutant, which retains the CCR7 chemokine receptor binding domain of SLC/CCL21 (amino acids 24-101), was used both in yeast two-hybrid assays with THAP1 bait and in in vitro GST-pull down assays with GST-THAP1.

[1342] For two-hybrid assays, yeast cells were cotransformed with BD7-THAP1 and AD7-SLC/CCL21 or AD7-SLC/CCL21ΔCOOH expression vectors. AD7-SLC/CCL21 or AD7-SLC/CCL21ΔCOOH expression vectors were generated by subcloning BamHI fragment (encoding SLC amino acids 24-134) or BamHI-PstI fragment (encoding SLC amino acids 24-102) from pGKT7-SLC/CCL21 (see example 15) into pGADT7 expression vector (Clontech). Transformants were selected on media lacking histidine and adenine. FIG. 13 shows that both the SLC/CCL21 wild type and the SLC/CCL21ΔCOOH deletion mutants could bind to THAP1. Identical results were obtained by cotransformation of AD7-THAP1 with BD7-SLC/CCL21 or BD7-SLC/CCL21ΔCOOH.

[1343] GST pull down assays, using in vitro-translated SLC/CCL21ΔCOOH, generated with the TNT-coupled reticulocyte lysate system (Promega, Madison, Wis., USA) using as template pGBKT7-SLC/CCL21ΔCOOH, were performed as described in Example 16. FIG. 13 shows that both the SLC/CCL21 wild type and the SLC/CCL21ΔCOOH deletion mutants could bind to THAP1.

### Example 18

### Preparation of THAP1/Fc Fusion Proteins

[1344] This example describes preparation of a fusion protein comprising THAP1 or the SLC/CCL21 chemokine-binding domain of THAP1 fused to an Fc region polypeptide derived from an antibody. An expression vector encoding the THAP1/Fc fusion protein is constructed as follows.

[1345] Briefly, the full length coding region of human THAP1 (SEQ ID NO: 3; amino acids-1 to 213) or the SLC/CCL21 chemokine-binding domain of human THAP1 (SEQ ID NO: 3; amino acids-143 to 213) is amplified by PCR. The oligonucleotides employed as 5′ primers in the PCR contain an additional sequence that adds a Not I restriction site upstream. The 3′ primer includes an additional sequence that encodes the first two amino acids of an Fc polypeptide, and a sequence that adds a Bgl II restriction site downstream of the THAP1 and Fc sequences.

[1346] A recombinant vector containing the human THAP1 cDNA is employed as the template in the PCR, which is conducted according to conventional procedures. The amplified DNA is then digested with Not I and Bgl II, and the desired fragments are purified by electrophoresis on an agarose gel.

[1347] A DNA fragment encoding the Fc region of a human IgG1 antibody is isolated by digesting a vector containing cloned Fc-encoding DNA with Bgl II and Not I. Bgl II cleaves at a unique Bgl II site introduced near the 5′ end of the Fc-encoding sequence, such that the Bgl II site encompasses the codons for amino acids three and four of the Fc polypeptide. Not I cleaves downstream of the Fc-encoding sequence. The nucleotide sequence of cDNA encoding the Fc polypeptide, along with the encoded amino acid sequence, can be found in International Publication No: WO93/1015 1, incorporated herein by reference in its entirety.

[1348] In a three-way ligation, the above-described THAP1 (or SLC/CCL21 chemokine-binding domain of THAP1)-encoding DNA and Fc-encoding. DNA are inserted into an expression vector that has been digested with Not I and treated with a phosphatase to minimize recircularization of any vector DNA without an insert. An example of a vector which can be used is pDC406 (described in McMahan et al., EMBO J. 10:2821, 1991), which is a mammalian expression vector that is also capable of replication in E. coli.

[1349] E. coli cells are then transfected with the ligation mixture, and the desired recombinant vectors are isolated. The vectors encode amino acids-1 to 213 of the THAP1 sequence (SEQ ID NO: 3) or amino acids-143 to 213 of the THAP1 sequence of (SEQ ID NO: 3), fused to the N-terminus of the Fc polypeptide. The encoded Fc polypeptide extends from the N-terminal hinge region to the native C-terminus, i.e., is an essentially full-length antibody Fc region.

[1350] CV-1/EBNA-1 cells are then transfected with the desired recombinant isolated from E. coli. CV-1/EBNA-1 cells (ATCC CRL 10478) can be transfected with the recombinant vectors by conventional procedures. The CV1-EBNA-1 cell line was derived from the African Green Monkey kidney cell line CV-1 (ATCC CCL 70), as described by McMahan et al. (1991). EMBO J. 10:2821. The transfected cells are cultured to allow transient expression of the THAP1/Fc or SLC/CCL21 chemokine-binding domain of THAP1/Fc fusion proteins, which are secreted into the culture medium. The secreted proteins contain the mature form of THAP1 or the SLC/CCL21 chemokine-binding domain of THAP1, fused to the Fc polypeptide. The THAP1/Fc and SLC/CCL21 chemokine-binding domain of THAP1/Fc fusion proteins are believed to form dimers, wherein two such fusion proteins are joined by disulfide bonds that form between the Fc moieties thereof. The THAP1/Fc and SLC/CCL21 chemokine-binding domain of THAP1/Fc fusion proteins can be recovered from the culture medium by affinity chromatography on a Protein A-bearing chromatography column.

### Example 19

### The THAP Domain Defines a Family of Nuclear Factors

[1351] To determine the subcellular localization of the different human THAP proteins, a series of GFP-THAP expression constructs were transfected into primary human endothelial cells. In agreement with the possible functions of THAP proteins as DNA-binding factors, we found that all the human THAP proteins analyzed (THAP0, 1, 2, 3, 6, 7, 8, 10, 11) localize preferentially to the cell nucleus (FIG. 14). In addition to their diffuse nuclear localization, some of the THAP proteins also exhibited association with distinct subnuclear structures: the nucleolus for THAP2 and THAP3, and punctuate nuclear bodies for THAP7, THAP8 and THAP11. Indirect immunofluorescence microscopy with anti-PML antibodies revealed that the THAP8 and THAP11 nuclear bodies colocalize with PML-NBs. Although the THAP7 nuclear bodies often appeared in close association with the PML-NBs, they never colocalized.

[1352] Analysis of the subcellular localization of the GFP-THAP fusion proteins was performed as described above (Example 3). The GFP-THAP constructs were generated as follows: the human THAP0 coding region was amplified by PCR from Hevec cDNA with primers THAP0-1 (5′-GCCGAATTCATGCCGAACTTCTGCGCTGCCCCC-3′) (SEQ ID NO: 216) and THAP0-2 (5′-CGCGGATCCTTAGGTTATTTTCCACAGTTTCGGAATTATC-3′) (SEQ ID NO: 217), digested with EcoRI and BamHI, and cloned in the same sites of the pEGFP-C2 vector, to generate pEGFPC2-THAP0; the coding region of human THAP2, 3, 7, 6 and 8 were amplified by PCR respectively from Image clone No: 3606376 with primers THAP2-1 (5′-GCGCTGCAGCAAGCTAAATTTAAATGAAGGTACTCTTGG-3′) (SEQ ID NO: 218) and THAP2-2 (5′-GCGAGATCTGGGAAATGCCGACCAATTGCGCTGCG-3′) (SEQ ID NO: 219) digested with Bgl II and Pst I, from Image clone No: 4813302 and No: 3633743 with primers THAP3-1 (5′-AGAGGATCCTTAGCTCTGCTGCTCTGGCCCAAGTC-3′) (SEQ ID NO: 220) THAP3-2 (5′-AGAGAATTCATGCCGAAGTCGTGCGCGGCCCG-3′) (SEQ ID NO: 221) and primers THAP7-1 (5′-GCGGAATTCATGCCGCGTCACTGCTCCGCCGC-3′) (SEQ ID NO: 222) THAP7-2 (5′-GCGGGATCCTCAGGCCATGCTGCTGCTCAGCTGC-3′) (SEQ ID NO: 223), digested with EcoRI and BamHI, from Image clone No: 757753 with primers THAP6-1 (5′-GCGAGATCTCGATGGTGAAATGCTGCTCCGCCATTGGA-3′) (SEQ ID NO: 224) and THAP6-2 (5′-GCGGGATCCTCATGAAATATAGTCCTGTTCTATGCTCTC-3′) (SEQ ID NO: 225) digested with BglII and BamHI, and from Image clone No: 4819178 with primers THAP8-1 (5′-GCGAGATCTCGATGCCCAAGTACTGCAGGGCGCCG-3′) (SEQ ID NO: 226) and THAP8-2 (5′-GCGGAATTCTTATGCACTGGGGATCCGAGTGTCCAGG-3′) (SEQ ID NO: 227), digested with BglII and EcoRI and cloned in frame downstream of the Enhanced Green Fluorescent Protein (EGFP) ORF in pEGFPC2 vector (Clontech) digested with the same enzymes to generate pEGFPC2-THAP2, -THAP3, -THAP7, -THAP6 and -THAP8; the human THAP10 and THAP11 coding region were amplified by PCR from Hela cDNA respectively with primers THAP10-1 (5′-GCGGAATTCATGCCGGCCCGTTGTGTGGCCGC-3′) (SEQ ID NO: 228) THAP10-2 (5′-GCGGGATCCTTAACATGTTTCTTCTTTCACCTGTACAGC-3′) (SEQ ID NO: 229) digested with EcoRI and BamHI, and with primers THAP11-1 (5′-GCGAGATCTCGATGCCTGGCTTTACGTGCTGCGTGC-3′) (SEQ ID NO: 230) and THAP11-2 (5′-GCGGAATTCTCACATTCCGTGCTTCTTGCGGATGAC-3′) (SEQ ID NO: 231), digested with BglII and EcoRI, cloned in the same sites of the pEGFP-C2 vector, to generate pEGFPC2-THAP10 and -THAP11.

### Example 20

### The THAP Domain Shares Structural Similarities with the DNA-binding Domain of Nuclear Hormone Receptors

[1353] In an effort to model the three-dimensional structure of the THAP domain, we searched the PDB crystallographic database. As sequence homology detection is more sensitive and selective when aided by secondary structure information, structural homologs of the THAP domain of human THAP1 were searched using the SeqFold threading program (Olszewski et al. (1999) Theor. Chem. Acc. 101, 57-61) which combines sequence and secondary structure alignment. The crystallographic structure of the thyroid hormone receptor β DBD (PDB code: 2NLL) gave the best score of the search and we used the resulting structural alignment, displayed in FIG. 15A, to derive a homology-based model of the THAP domain from human THAP1 (FIG. 15B). Note that the distribution of Cys residues in the THAP domain does not fully match that of the thyroid hormone receptor β DBD (FIG. 1 5A) and hence cannot allow the formation of the two characteristic ‘C4-type’ Zn-fingers (red color-coding in FIG. 15A). However, a network of stacking interactions between aromatic/hydrophobic residues or aliphatic parts of lysine side-chains ensures the stability of the structure of the THAP domain (cyan color-coding in FIGS. 15A and 15B). Interestingly the same threading method applied independently to the Drosophila P-element transposase DBD identified the crystallographic structure of the glucocorticoid receptor DBD (PDB code: 1GLU) as giving the best score. In the same way, we used the resulting structural alignment, displayed in FIG. 15D, to build a model of the transposase DBD (FIG. 15C). Note the presence of an hydrophobic core equivalent to that of the THAP domain (cyan color-coding in FIGS. 15C and 15D). All the DNA-binding domains of the nuclear receptors fold into a typical pattern which is mainly based on two interacting α-helices, the first one inserting into the target DNA major groove. Our threading and modeling results indicate that the THAP domain and the D. melanogaster P-element transposase DBD likely share a common topology which is similar to that of the DBD of nuclear receptors.

[1354] Molecular modeling was performed using the InsightII, SeqFold, Homology and Discover modules from the Accelrys (San Diego, Calif.) molecular modeling software (version 98), run on a Silicon Graphics 02 workstation. Optimal secondary structure prediction of the query protein domains was ensured by the DSC method within SeqFold. The threading-derived secondary structure alignments was used as input for homology-modeling, which was performed according to a previously described protocol (Manival et al. (2001) Nucleic Acids Res 29 :2223-2233). The validity of the models was checked both by Ramachandran analysis and folding consistency verification as previously reported (Manival et al. (2001) Nucleic Acids Res 29 :2223-2233).

### Example 21

### Homodimerization Domain of Human THAP1

[1355] To identify the sequences mediating homodimerization of THAP1, a series of THAP1 deletion constructs was generated as described in Example 7.

[1356] Two-hybrid interaction between THAP1 mutants and THAP1 wild type was tested by cotransformation of AH109 with pGADT7-THAP1-C1, -C2, -C3, -N1, -N2 or -N3 and pGBKT7-THAP1 wild-type and selection of transformants by His and Ade double auxotrophy according to manufacturer's instructions (MATCHMAKER two-hybrid system 3, Clontech). Positive two-hybrid interaction with THAP1 wild type was observed with mutants THAP1-C1, -C2, -C3, -and -N3 but not with mutants THAP1-N1and -N2, suggesting the THAP1 homodimerization domain is found between THAP1 residues 143 and 192 (FIG. 16A).

[1357] To confirm the results obtained in yeast, THAP1 mutants were also tested in in vitro GST pull down assays. Wild type THAP1 expressed as a GST-tagged fusion protein and immobilized on glutathione sepharose (as described in example 16), was incubated with radiolabeled in vitro translated THAP1 mutants. In vitro-translated THAP1 mutants were generated with the TNT-coupled reticulocyte lysate system (Promega, Madison, Wis., USA) using pGADT7-THAP1-C1, -C2, -C3, -N1, -N2 or -N3 vector as template. 25 μl of each ³⁵S-labelled THAP1 mutant was incubated with immobilized GST or GST-THAP1 wild-type protein overnight at 4° C., in the following binding buffer: 10 mM NaPO4 pH 8.0, 140 mM NaCl, 3 mM MgCl2, 1 mM dithiothreitol (DTT), 0.05% NP40, and 0.2 mM phenylmethyl sulphonyl fluoride (PMSF), 1 mM Na Vanadate, 50 mM β Glycerophosphate, 25 μg/ml chimotrypsine, 5 μg/ml aprotinin, 10 μg/ml Leupeptin. Beads were then washed 5 times in 1 ml binding buffer. Bound proteins were eluted with 2×Laemmli SDS-PAGE sample buffer, fractionated by 10% SDS-PAGE and visualized by fluorography using Amplify (Amersham Pharmacia Biotech). As expected, THAP1-C1, -C2, -C3, -and -N3 interacted with GST/THAP1 (FIG. 16B). In contrast, THAP1-N1 and -N2 failed to interact with GST/THAP1 beads. Therefore, essentially identical results were obtained with the two THAP1/THAP1 interactions assays: the THAP1 homodimerization domain of THAP1 is found between residues 143 and 192 of human THAP1.

### Example 22

### Alternatively Spliced Isoform of Human THAP1

[1358] The two distinct THAP1 cDNAs, THAP1a and THAP1b have been discovered (FIG. 17A). These splice variants, were amplified by PCR from HEVEC cDNA with primers 2HMR10 (5′-CCGAATTCAGGATGGTGCAGTCCTGCTCCGCCT-3′) (SEQ ID NO: 232) and 2HMR9 (5′-CGCGGATCCTGCTGGTACTTCAACTATTTCAAAGTAGTC-3′) (SEQ ID NO: 233), digested with EcoRI and BamHI, and cloned in frame upstream of the Enhanced Green Fluorescent Protein (EGFP) ORF in pEGFP.N3 vector (Clontech) to generate pEGFP.N3-THAP1a and pEGFP-THAP1b. DNA sequencing revealed that THAP1b cDNA isoform lacks exon 2 (nucleotides 273-468) of the human THAP1 gene (FIG. 17B). This alternatively spliced isoform of human THAP1 (˜2 kb mRNA) was also observed in many other tissues by Northern blot analysis (see FIG. 2). The THAP1a/GFP and THAP1b/GFP expression constructs were then transfected into COS 7 cells (ATCC) and expression of the fusion proteins was analyzed by western blotting with anti-GFP antibodies. The results are shown in FIG. 17C which demonstrates that the second isoform of human THAP1 (THAP1b) encodes a truncated THAP1 protein (THAP1 C3) lacking a substantial portion of the amino terminus (amino acids 1-142 of SEQ ID NO: 3).

### Example 23

### High Throughput Screening Assay for Modulators of THAP Family Polypeptide Pro-apoptotic Activity

[1359] A high throughput screening assay for molecules that abrogate or stimulate THAP-family polypeptide proapoptotic activity was developed, based on serum-withdrawal induced apoptosis in a 3T3 cell line with tetracycline-regulated expression of a THAP family polypeptide.

[1360] In a preferred example, the THAP1 cDNA with an in-frame myc tag sequence, was amplified by PCR using pGBKT7-THAP1 as a template with primers myc.BD7 (5′-GCGCTCTAGAGCCATCATGGAGGAGCAGAAGCTGATC-3′) (SEQ ID NO: 234) and 2HMR15 (5′-GCGCTCTAGATTATGCTGGTACTTCAACTATTTCAAAGTAG-3′) (SEQ ID NO: 235), and cloned downstream of a tetracycline regulated promoter in plasmid vector pTRE (Clontech, Palo Alto, Calif.), using Xba I restriction site, to generate plasmid pTRE-mycTHAP1. To establish 3T3-TO-mycTHAP1 stable cell lines, mouse 3T3-TO fibroblasts (Clontech) were seeded at 40 to 50% confluency and co-transfected with the pREP4 plasmid (Invitrogen), which contains a hygromycin B resistance gene, and the mycTHAP1 expression vector (pTRE-mycTHAP1) at 1:10 ratio, using Lipofectamine Plus reagent (Life Technologies) according to supplier's instructions. Transfected cells were selected in medium containing hygromycin B (250 U/ml; Calbiochem) and tetracycline (2 ug/ml; Sigma). Several resistant colonies were picked and analyzed for the expression of mycTHAP1 by indirect immunofluorescence using anti-myc epitope monoclonal antibody (mouse IgG1, 1/200, Clontech). A stable 3T3-TO cell line expressing mycTHAP1 (3T3-TO-mycTHAP1) was selected and grown in Dulbecco's Modified Eagle's Medium supplemented with 10% Fetal Calf Serum, 1% Penicillin-streptomycin (all from Life Technologies, Grand Island, N.Y., USA) and tetracycline (2 ug/ml; Sigma). Induction of THAP1 expression into this 3T3-TO-mycTHAP1 cell line was obtained 48 h after removal of tetracycline in the complete medium.

[1361] A drug screening assay using the 3T3-TO-mycTHAP1 cell line can be carried out as follows. 3T3-TO-mycTHAP1 cells are plated in 96- or 384-wells microplates and THAP1 expression is induced by removal of tetracycline in the complete medium. 48 h later, the apoptotic response to serum withdrawal is assayed in the presence of a test compound, allowing the identification of test compounds that either enhance or inhibit the ability of THAP1 polypeptide to induce apoptosis. Serum starvation of 3T3-TO-mycTHAP1 cells is induced by changing the medium to 0% serum, and the amount of cells with apoptotic nuclei is assessed 24 h after induction of serum starvation by TUNEL labeling in 96- or 384-wells microplates. Cells are fixed in PBS containing 3.7% formaldehyde and permeabilized with 0.1% Triton-X100, and apoptosis is scored by in situ TUNEL (terminal deoxynucleotidyl transferase-mediated dUTP nick end labeling) staining of apoptotic nuclei for 1 hr at 37° C. using the in situ cell death detection kit, TMR red (Roche Diagnostics, Meylan, France). The intensity of TMR red fluorescence in each well is then quantified to identify test compounds that modify the fluorescence signal and thus either enhance or inhibit THAP1 pro-apoptotic activity.

### Example 24

### High Throughput Two-hybrid Screening Assay for Drugs that Modulate THAP-family Polypeptide/THAP-family Target Protein Interaction

[1362] To identify drugs that modulate THAP1/Par4 or THAP1/SLC interactions, a two-hybrid based high throughput screening assay can be used.

[1363] As described in Example 17, AH109 yeast cells (Clontech) cotransformed with plasmids pGBKT7-THAP1 and pGADT7-Par4 or pGADT7-SLC can be grown in 384-well plates in selective media lacking histidine and adenine, according to manufacturer's instructions (MATCHMAKER two-hybrid system 3, Clontech).

[1364] Growth of the transformants on media lacking histidine and adenine is absolutely dependent on the THAP1/Par4 or THAP1/SLC two-hybrid interaction and drugs that disrupt THAP1/Par4 or THAP1/SLC binding will therefore inhibit yeast cell growth.

[1365] Small molecules (5 mg/ml in DMSO; Chembridge) are added by using plastic 384-pin arrays (Genetix). The plates are incubated for 4 to 5 days at 30° C., and small molecules which inhibit the growth of yeast cells by disrupting THAP1/Par4 or THAP1/SLC two-hybrid interaction are selected for further analysis.

### Example 25

### High Throughput in Vitro Assay to Identify Inhibitors of THAP-family Polypeptide/THAP-family Protein Target Interaction

[1366] To identify small molecule modulators of THAP function, a high-throughput screen based on fluorescence polarization (FP) is used to monitor the displacement of a fluorescently labelled THAP1 protein from a recombinant glutathione-S-transferase (GST)-THAP binding domain of Par4 (Par4DD) fusion protein or a recombinant GST-SLC/CCL21 fusion protein.

[1367] Assays are carried out essentially as in Degterev et al, Nature Cell Biol. 3: 173-182 (2001) and Dandliker et al, Methods Enzymol. 74: 3-28 (1981). The assay can be calibrated by titrating a THAP1 peptide labelled with Oregon Green with increasing amounts of GST-Par4DD or GST-SLC/CCL21 proteins. Binding of the peptide is accompanied by an increase in polarization (mP, millipolarization).

[1368] THAP 1 and PAR4 polypeptides and GST-fusions can be produced as previously described. The THAP1 peptide was expressed and purified using a QIAexpressionist kit (Qiagen) according to the manufacturer's instructions. Briefly, the entire THAP1 coding sequence was amplified by PCR using pGBKT7-THAP1 as a template with primers 2HMR8 (5′-CGCGGATCCGTGCAGTCCTGCTCCGCCTACGGC-3′) (SEQ ID NO: 236) and 2HMR9 (5′-CGCGGATCCTGCTGGTACTTCAACTATTTCAAAGTAGTC-3′) (SEQ ID NO: 237), and cloned into the BamHI site of pQE30 vector (Qiagen). The resulting pQE30-HisTHAP1 plasmid was transformed in E. coli strain M15 (Qiagen). 6×His-tagged-THAP1 protein was purified from inclusion bodies on a Ni-Agarose column (Qiagen) under denaturing conditions, and the eluate was used for in vitro interaction assays. To produce GST-Par4DD fusion protein, Par4DD (amino acids 250-342) was amplified by PCR with primers Par4.10 (5′-GCCGGATCCGGGTTCCCTAGATATAACAGGGATGCAA-3′) (SEQ ID NO: 238) and Par4.5 (5′-GCGGGATCCCTCTACCTGGTCAGCTGACCCACAAC-3′) (SEQ ID NO: 239), and cloned in frame downstream of the Glutathione S-Transferase (GST) ORF, into the BamHI site of the pGEX-2T prokaryotic expression vector (Amersham Pharmacia Biotech, Saclay, France). Similarly, to produce GST-SLC/CCL21 fusion protein, the mature form of human SLC/CCL21 (amino acids 24-134) was amplified by PCR with primers hSLCbam.5′ (5′-GCGGGATCCAGTGATGGAGGGGCTCAGGACTGTTG-3′) (SEQ ID NO: 240) and hSLCbam.3′ (5′-GCGGGATCCCTATGGCCCTTTAGGGGTCTGTGACC-3′) (SEQ ID NO: 241), digested with BamHI and inserted into the BamHI cloning site of the pGEX-2T vector. GST-Par4DD (amino acids 250-342) and GST-SLC/CCL21 (amino acids 24-134) fusion proteins were expressed in E. Coli DH5α (supE44, DELTAlacU169 (801acZdeltaM15), hsdR17, recA1, endA1, gyrA96, thi1, relA 1) and purified by affinity chromatography with glutathione sepharose according to supplier's instructions (Amersham Pharmacia Biotech).

[1369] For screening small molecules, THAP1 peptide is labelled with succinimidyl Oregon Green (Molecular Probes, Eugene, Oreg.) and purified by HPLC. 33 nM labelled THAP1 peptide, 2 μM GST-Par4DD or GST-SLC/CCL21 protein, 0.1% bovine gamma-globullin (Sigma) and 1 mM dithiothreitol mixed with PBS, pH 7.2 (Gibco), are added to 384-well black plates (Lab Systems) with Multidrop (Lab Systems). Small molecules (5 mg/ml in DMSO; Chembridge) are transferred by using plastic 384-pin arrays (Genetix). The plates are incubated for 1-2 hours at 25° C., and FP values are determined with an Analyst plate reader (LJL Biosystems).

### Example 26

### High Throughput Chip Assay to Identify Inhibitors of THAP-family Polypeptide/THAP-family Protein Target Interaction

[1370] A chip based binding assay Degterev et al, (2001) Nature Cell Biol. 3: 173-182 using unlabelled THAP and THAP-family target protein may be used to identify molecules capable of interfering with THAP-family and THAP-family target interactions, providing high sensitivity and avoiding potential interference from label moieties. In this example, the THAP1 binding domain of Par4 protein (Par4DD) or SLC/CCL21 is covalently attached to a surface-enhanced laser desorption/ionization (SELDI) chip, and binding of unlabelled THAP1 protein to immobilized protein in the presence of a test compound is monitored by mass spectrometry.

[1371] Recombinant THAP1 protein, GST-Par4DD and GST-SLC/CCL21 fusion proteins are prepared as described in Example 25. Purified recombinant GST-Par4DD or GST-SLC/CCL21 protein is coupled through its primary amine to SELDI chip surfaces derivatized with cabonyldiimidazole (Ciphergen). THAP1 protein is incubated in a total volume of 1 μl for 12 hours at 4° C. in a humidified chamber to allow binding to each spot of the SELDI chip, then washed with alternating high-pH and low-pH buffers (0.1M sodium acetate containing 0.5M NaCl, followed by 0.01 M HEPES, pH 7.3). The samples are embedded in an alpha-cyano-4-hydroxycinnamic acid matrix and analyzed for mass by matrix-assisted laser desorption ionization time-of-flight (MALDI-TOF) mass spectrometry. Averages of 100 laser shots at a constant setting are collected over 20 spots in each sample.

### Example 27

### High Throughput Cell Assay to Identify Inhibitors of THAP-family Polypeptide/THAP-family Protein Target Interaction

[1372] A fluorescence resonance energy transfer (FRET) assay is carried out between THAP-1 and PAR4 or SLC/CCL21 proteins fused with fluorescent proteins. Assays can be carried out as in Majhan et al, Nature Biotechnology 16: 547-552 (1998) and Degterev et al, Nature Cell Biol. 3: 173-182 (2001).

[1373] THAP-1 protein is fused to cyan fluorescent protein (CFP) and PAR4 or SLC/CCL21 protein is fused to yellow fluorescent protein (YFP). Vectors containing THAP-family and THAP-family target proteins can be constructed essentially as in Majhan et al (1998). A THAP-1-CFP expression vector is generated by subcloning a THAP-1 cDNA into the pECFP-N1 vector (Clontech). PAR4-YFP or SLC/CCL21-CYP expression vectors are generated by subcloning a PAR4 or a SLC/CCL21 cDNA into the pEYFP-N1 vector (Clontech).

[1374] Vectors are cotransfected to HEK-293 cells and cells are treated with test compounds. HEK-293 cells are transfected with THAP-1-CFP and PAR4-YFP or SLC/CCL21-YFP expression vectors using Lipofect AMINE Plus (Gibco) or TransLT-1 (PanVera). 24 hours later cells are treated with test compounds and incubated for various time periods, preferably up to 48 hours. Cells are harvested in PBS, optionally supplemented with test compound, and fluorescence is determined with a C-60 fluorimeter (PTI) or a Wallac plate reader. Fluorescence in the samples separately expressing THAP-1-CFP and PAR4-YFP or SLC/CCL21-YFP is added together and used to estimate the FRET value in the absence of THAP-1/PAR4 or THAP1/SLC/CCL21 binding.

[1375] The extent of FRET between CFP and YFP is determined as the ratio between the fluorescence at 527 nm and that at 475 nm after excitation at 433 nm. The cotransfection of THAP-1 protein and PAR4 or SLC/CCL21 protein results in an increase of FRET ratio over a reference FRET ratio of 1.0 (determined using samples expressing the proteins separately). A change in the FRET ratio upon treatment with a test compound (over that observed after cotransfection in the absence of a test compound) indicates a compound capable of modulating the interaction of the THAP-1 protein and the PAR4 or the SLC/CCL21 protein.

### Example 28

### In Vitro Assay to Identify THAP-family Polypeptide DNA Targets

[1376] DNA binding specificity of THAP1 was determined using a random oligonucleotide selection method allowing unbiased analysis of binding sites selected by the THAP domain of the THAP1 protein from a random pool of possible sites. The method was carried out essentially as described in Bouvet (2001) Methods Mol Biol. 148:603-10. Also, see Pollack and Treisman (1990) Nuc. Acid Res. 18:6197-6204; Blackwell and Weintraub, (1990) Science 250: 1104-1110; Ko and Engel, (1993) Mol. Cell. Biol. 13:4011-4022; Merika and Orkin, (1993) Mol. Cell. Biol. 13: 3999-4010; and Krueger and Morimoto, (1994) Mol. Cell. Biol. 14:7592-7603), the disclosures of which are incorporated herein by reference in their entireties.

[1377] Recombinant THAP Domain Expression and Purification

[1378] A cDNA fragment encoding the THAP domain of human THAP-1 (amino acids 1-90, SEQ ID NO: 3) was cloned by PCR using as a template pGADT7-THAP-1 (see Example 4) with the following primers 5′-GCGCATATGGTGCAGTCCTGCTCCGCCTACGGC-3′ (SEQ ID NO: 242) and 5′-GCGCTCGAGTTTCTTGTCATGTGGCTCAGTACAAAG-3′ (SEQ ID NO: 243). The PCR product was cloned as a NdeI-XhoI fragment into pET-21c prokaryotic expression vector (Novagen) in frame with a sequence encoding a carboxy terminal His tag, to generate pET-21 c-THAP.

[1379] For the expression of THAP-His6, pET-21c-THAP was transformed into Escherichia coli strain BL-21 pLysS. Bacteria were grown at 37° C. to an optical density at 600 mn of 0.6 and expression of the protein was induced by adding isopropyl-β-D-thiogalactoside (Sigma) at a final concentration of 1 mM and incubation was continued for 4 hours.

[1380] The cells were collected by centrifugation and resuspended in ice cold of buffer A (50 mM sodium-phosphate pH 7.5, 300 mM NaCl, 0.1% β-mercaptoethanol, 10 mM Imidazole). Cells were lysed by sonication and the lysate was cleared by centrifugation at 12000 g for 45 min. The supernatant was loaded onto a Ni-NTA agarose column (Quiagen) equilibrated in buffer A. After washing with buffer A and Buffer A with 40 mM Imidazole, the protein was eluted with buffer B (same as A with 0.05% β-mercaptoethanol and 250 mM Imidazole).

[1381] Fractions containing THAP-His6 were pooled and applied to a Superdex 75 gel filtration column equilibrated in Buffer C (Tris-HCl 50 mM pH 7.5, 150 mM NaCl, 1 mM DTT). Fractions containing the THAP-His6 protein were pooled, concentrated by withn YM-3 Amicon filter devices and stored at 4° C. or frozen at −80° C. in buffer C containing 20% glycerol. The purity of the sample was assessed by SDS-Polyarylamide Gel Electrophoresis (PAGE) and Coomassie blue staining analysis. The structural integrity of the protein preparation was checked by ESI mass spectrometry and Peptide mass mapping using a MALDI-TOF Mass spectrometer. The protein concentration was determined with Bradford Protein Assay.

[1382] Random Oligonucleotide Selection

[1383] According to the SELEX protocol described in Bouvet (2001) Methods Mol Biol. 148:603-10, a 62 bp oligonucleotide having sequences as follows was synthesized: 5′-TGGGCACTATTTATATCAAC-N25-AATGTCGTTGGTGGCCC-3′ (SEQ ID NO: 244) where N is any nucleotide, and primers complementary to each end. Primer P is: 5′-ACCGCAAGCTTGGGCACTATTTATATCAAC-3′ (SEQ ID NO: 245), and primer R is 5′-GGTCTAGAGGGCCACCAACGCATT-3′ (SEQ ID NO: 246). The 62-mer oligonucleotide is made double stranded by PCR using the P and R primers generating a 80 bp random pool.

[1384] About 250 ng of THAP-His6 was incubated with Ni-NTA magnetic beads in NT2 buffer (20 mM Tris-HCl pH 7.5, 100 mM NaCl, 0.05% NP-40) for 30 min at 4° C. on a roller. The beads were washed 2 times with 500 μl of NT2 buffer to remove unbound protein. The immobilized THAP-His6 was incubated with the random pool of double stranded 80 bp DNA (2 to 5 μg) in 100 μl of Binding buffer (20 mM Tris-HCl pH 7.5, 100 mM NaCl, 0.05% NP-40, 0.5 mM EDTA, 100 μg/ml BSA, and 20 to 50 μg of poly(dI-dC)) for 10 minutes at room temperature. The beads were then washed 6 times with 500 μl of NT2 buffer. The protein/DNA complex were then subjected to extraction with phenol/chloroform and precipitation with ethanol using 10 μg of glycogen as a carrier. About one fifth of the recovered DNA was then amplified by 15 to 20 cycles of PCR and used for the next round of selection. After 8 rouds of selection, the NaCl concentration was progressively increased to 150 mM.

[1385] After 12 rounds of selection by THAP-His6, pools of amplified oligonucleotides were digested with Xba I and Hind III and cloned into pBluescript II KS—(Stratagene) and individual clones were sequenced using Big Dye terminator Kit (Applied Biosystem).

[1386] The results of the sequence analysis show that the THAP domain of human THAP1 is a site-specific DNA binding domain. Two consensus sequences were deduced from the alignment of two sets of nucleotide sequences obtained from the above SELEX procedure (each set containing 9 nucleic acid sequences). In particular, it was found that the THAP domain recognizes GGGCAA or TGGCAA DNA target sequences preferentially organized as direct repeats with 5 nucleotide spacing (DR-5 motifs). The consensus sequence being GGGCAAnnnnnTGGCAA (SEQ ID NO: 149). Additionally, THAP recognizes everted repeats with 11 nucleotide spacing (ER-11 motifs) having a consensus sequence of TTGCCAnnnnnnnnnnnGGGCAA (SEQ ID NO: 159). Although GGGCAA and TGGCAA sequences constitute the preferential THAP domain DNA binding sites, GGGCAT, GGGCAG and TGGCAG sequences are also DNA target sequences recognized by the THAP domain.

### Example 28B

### The THAP Domain is a Zinc-dependent Sequence Specific DNA-binding Domain

[1387] To confirm that the THAP domain is a novel sequence specific DNA-binding domain, electrophoretic mobility shift assays (EMSA) were carried out using wild-type or mutant THAP domain responsive elements (THRE) determined by SELEX (see Example 28 and FIGS. 18 and 24). Double-stranded probes used in EMSA experiments were purified on 12% polyacrylamide gels, ³²P end labeled with T4 polynucleotide kinase and quantified by Cerenkov counting. About 20 ng of purified THAP domain from human THAP1 (prepared as described in Example 28) was incubated with 30000 cpm of the appropriate probe (about 2 ng). Binding reactions were carried out for 10 minutes at room temperature in 20 μl binding buffer (20 mM Tris-HCl pH 7.5, 100 mM KCl, 0.1% NP-40, 100 μg/ml BSA, 2.5 mM DTT, 5% glycerol, 200 ng poly (dI-dC)). Electrophoresis was performed on 8% (29:1) polyacrylamide gels containing 5% glycerol. Gels were run in 0.25×TBE at 150V and 4° C., dried and exposed on a phosphoimager screen (Molecular Dynamics). Sequences of wild type and mutant THRE oligonucleotides used in EMSA experiments were as follow (mutations are indicated in bold): wild-type probe 3, 5′-AGCAAGTAAGGGCAAACTACTTCAT-3′ (SEQ ID NO: 313); mutant probe 3mut1, 5′-AGCAAGTAATTTCAAACTACTTCAT-3′ (SEQ ID NO: 314); mutant probe 3mut3, 5′-AGCAAGTAAGGTCAAACTACTTCAT-3′ (SEQ ID NO: 319); mutant probe 3mut4, 5′-AGCAAGTAAGTGCAAACTACTTCAT-3′ (SEQ ID NO: 320); mutant probe 3mut14, 5′-AGCAAGTAAGGGCCAACTACTTCAT-3′ (SEQ ID NO: 321); mutant probe 3mut5, 5′-AGCAAGTAAGGGAAAACTACTTCAT-3′ (SEQ ID NO: 322).

[1388] These EMSA assays revealed that the THAP domain recognizes wild-type (probe 3) but not mutant THRE oligonucleotides (probes 3mut1, 3mut3, 3mut4, 3mut14, 3mut5) (FIG. 25A). For competition experiments, 50-, 150-, and 250-fold molar excess of unlabelled wild-type (THRE competitor, probe 3) or mutant (non-specific competitor, probe 3mut1) THRE oligonucleotides were added to the reaction mixture just before the addition of the probe. This analysis revealed that the DNA-binding activity of the THAP domain is abrogated by increasing amounts of the THRE competitor but not affected by the non-specific competitor (FIG. 25B). Together, these experiments demonstrated that the THAP domain is a novel sequence-specific DNA-binding domain.

[1389] Since the THAP domain is characterized by a C2-CH conserved motif that may function as a Zn-binding site, we then determined whether DNA-binding activity of the THAP domain is Zn-dependent. For metal chelation experiments, EDTA (5 mM or 50 mM) or 1,10 phenanthroline (Sigma, 1 mM or 5 mM in methanol vehicle) were preincubated with the THAP domain in binding buffer for 20 minutes at room temperature, before the EMSA assay (FIG. 26A). To reconstitute DNA-binding activity of the THAP domain in the presence of 1,10 phenanthroline (+Phe, 5 mM), Zn or Mg, as indicated, were added at 100 or 500 μM final concentration in binding buffer (FIG. 26B). Reactions were allowed to equilibrate for 10 minutes at room temperature before the addition of the EMSA THRE probe (probe 3). These analyses revealed that the DNA-binding activity of the THAP domain is abrogated by the metal-chelator 1,10 phenanthroline (FIG. 26A) but specifically restored by the addition of Zinc (FIG. 26B), indicating that the THAP domain is a novel zinc-dependent sequence-specific DNA-binding domain.

### Example 29

### High Throughput in Vitro Assay to Identify Inhibitors of THAP-family Polypeptide or THAP-family Interactions with Nonspecific DNA Targets

[1390] High throughput assays for the detection and quantification of THAP1-nonspecific DNA binding is carried out using a scintillation proximity assay. Materials are available from Amersham (Piscataway, N.J.) and assays can be carried out according to Gal S. et al, 6^{th} Ann. Conf. Soc. Biomol. Screening, 6-9 Sept 2000, Vancouver, B.C.), the disclosure of which is incorporated herein by reference in its entirety.

[1391] Random double stranded DNA probes are prepared and labeled using [³H]TTP and terminal transferase to a suitable specific activity (e.g. approx. 420 i/mmol). THAP1 protein or a portion thereof is prepared and the quantity of THAP1 protein or a portion thereof is determined via ELISA. For assay development purposes, electrophoretic mobility shift assays (EMSA) can be carried out to select suitable assay parameters. For the high throughput assay, ³H labeled DNA, anti-THAP1 monoclonal antibody and THAP1 in binding buffer (Hepes, pH 7.5; EDTA; DTT; 10 nM ammonium sulfate; KCl and Tween-20) are combined. The assay is configured in a standard 96-well plate and incubated at room temperature for 5 to 30 minutes, followed by the addition of 0.5 to 2 mg of PVT protein A SPA beads in 50-100 μl binding buffer. The radioactivity bound to the SPA beads is measured using a TopCount™ Microplate Counter (Packard Biosciences, Meriden, Conn.).

### Example 30

### High Throughput in Vitro Assay to Identify Inhibitors of THAP-family Polypeptide or THAP-family Interactions with Specific DNA Targets

[1392] High throughput assays for the detection and quantification of THAP1 specific DNA binding is carried out using a scintillation proximity assay. Materials are available from Amersham (Piscataway, N.J.) and assays can be carried out according to Gal S. et al, 6^{th} Ann. Conf. Soc. Biomol. Screening, 6-9 Sep. 2000, Vancouver, B.C.).

[1393] THAP1-specific double stranded DNA probes corresponding to THAP1 DNA binding sequences obtained according to Example 28 are prepared. The probes are labeled using [³H]TTP and terminal transferase to a suitable specific activity (e.g. approx. 420 i/mmol). THAP1 protein or a portion thereof is prepared and the quantity of THAP1 protein or a portion thereof is determined via ELISA. For assay development purposes, electrophoretic mobility shift assays (EMSA) can be carried out to select suitable assay parameters. For the high throughput assay, ³H labeled DNA, anti-THAP1 monoclonal antibody, 1 μg non-specific DNA (double or single stranded poly-dAdT) and THAP1 protein or a portion thereof in binding buffer (Hepes, pH7.5; EDTA; DTT; 10 mM ammonium sulfate; KCl and Tween-20) are combined. The assay is configured in a standard 96-well plate and incubated at room temperature for 5 to 30 minutes, followed by the addition of 0.5 to 2 mg of PVT protein A SPA beads in 50-100 μl binding buffer. The radioactivity bound to the SPA beads is measured using a TopCount™ Microplate Counter (Packard Biosciences, Meriden, Conn.).

### Example 31

### Preparation of Antibody Compositions

[1394] Substantially pure THAP1 protein or a portion thereof is obtained. The concentration of protein in the final preparation is adjusted, for example, by concentration on an Amicon filter device, to the level of a few micrograms per ml. Monoclonal or polyclonal antibodies to the protein can then be prepared as follows: Monoclonal Antibody Production by Hybridoma Fusion Monoclonal antibody to epitopes in the THAP1 protein or a portion thereof can be prepared from murine hybridomas according to the classical method of Kohler and Milstein (Nature, 256: 495, 1975) or derivative methods thereof (see Harlow and Lane, Antibodies A Laboratory Manual, Cold Spring Harbor Laboratory, pp. 53-242, 1988), the disclosure of which is incorporated herein by reference in its entirety.

[1395] Briefly, a mouse is repetitively inoculated with a few micrograms of the THAP1 protein or a portion thereof over a period of a few weeks. The mouse is then sacrificed, and the antibody producing cells of the spleen isolated. The spleen cells are fused by means of polyethylene glycol with mouse myeloma cells, and the excess unfused cells destroyed by growth of the system on selective media comprising aminopterin (HAT media). The successfully fused cells are diluted and aliquots of the dilution placed in wells of a microtiter plate where growth of the culture is continued. Antibody-producing clones are identified by detection of antibody in the supernatant fluid of the wells by immunoassay procedures, such as ELISA, as originally described by Engvall, E., Meth. Enzymol. 70: 419 (1980), the disclosure of which is incorporated herein by reference in its entirety. Selected positive clones can be expanded and their monoclonal antibody product harvested for use. Detailed procedures for monoclonal antibody production are described in Davis, L. et al. Basic Methods in Molecular Biology, Elsevier, N.Y., Section 21-2, the disclosure of which is incorporated herein by reference in its entirety.

[1396] Polyclonal Antibody Production by Immunization

[1397] Polyclonal antiserum containing antibodies to heterogeneous epitopes in the THAP1 protein or a portion thereof can be prepared by immunizing suitable non-human animal with the THAP1 protein or a portion thereof, which can be unmodified or modified to enhance immunogenicity. A suitable nonhuman animal, preferably a non-human mammal, is selected. For example, the animal may be a mouse, rat, rabbit, goat, or horse. Alternatively, a crude protein preparation which, has been enriched for THAP1 or a portion thereof can be used to generate antibodies. Such proteins, fragments or preparations are introduced into the non-human mammal in the presence of an appropriate adjuvant (e. g. aluminum hydroxide, RIBI, etc.) which is known in the art. In addition the protein, fragment or preparation can be pretreated with an agent which will increase antigenicity, such agents are known in the art and include, for example, methylated bovine serum albumin (mBSA), bovine serum albumin (BSA), Hepatitis B surface antigen, and keyhole limpet hemocyanin (KLH). Serum from the immunized animal is collected, treated and tested according to known procedures. If the serum contains polyclonal antibodies to undesired epitopes, the polyclonal antibodies can be purified by immunoaffinity chromatography.

[1398] Effective polyclonal antibody production is affected by many factors related both to the antigen and the host species. Also, host animals vary in response to site of inoculations and dose, with both inadequate or excessive doses of antigen resulting in low titer antisera. Small doses (ng level) of antigen administered at multiple intradermal sites appears to be most reliable. Techniques for producing and processing polyclonal antisera are known in the art, see for example, Mayer and Walker (1987), the disclosure of which is incorporated herein by reference in its entirety. An effective immunization protocol for rabbits can be found in Vaitukaitis, J. et al. J. Clin. Endocrinol. Metab. 33: 988-991 (1971), the disclosure of which is incorporated herein by reference in its entirety. Booster injections can be given at regular intervals, and antiserum harvested when antibody titer thereof, as determined semi-quantitatively, for example, by double immunodiffusion in agar against known concentrations of the antigen, begins to fall. See, for example, Ouchterlony, O. et al., Chap. 19 in: Handbook of Experimental Immunology D. Wier (ed) Blackwell (1973). Plateau concentration of antibody is usually in the range of 0.1 to 0.2 mg/ml of serum (about 12: M). Affinity of the antisera for the antigen is determined by preparing competitive binding curves, as described, for example, by Fisher, D., Chap. 42 in: Manual of Clinical Immunology, 2d Ed. (Rose and Friedman, Eds.) Amer. Soc. For Microbiol., Washington, D.C. (1980).

[1399] Antibody preparations prepared according to either the monoclonal or the polyclonal protocol are useful in quantitative immunoassays which determine concentrations of antigen-bearing substances in biological samples; or they are also used semi-quantitatively or qualitatively to identify the presence of antigen in a biological sample. The antibodies may also be used in therapeutic compositions for killing cells expressing the protein or reducing the levels of the protein in the body.

### Example 32

### Two Hybrid THAP1/Chemokine Interaction Assay

[1400] Two-hybrid interaction between THAP1 and chemokines CCL21, CCL19, CXCL9, CXCL10, CXCL11 or cytokine IFNγ was tested by cotransformation of AH109 with pGADT7-THAP1 and pGBKT7-CCL21, -CCL19, -CXCL9, -CXCL10, -CXCL11 and -IFNγ plasmids and selection of transformants by His and Ade double auxotrophy according to manufacturer's instructions (MATCHMAKER two-hybrid system 3, Clontech). pGBKT7-chemokine vectors were generated using cDNAs encoding the mature forms of human chemokines CCL21 (see Example 15) (SLC polypeptide SEQ ID NO: 271, SLC cDNA SEQ ID NO: 272); CCL19 (amino acids 22-98 of GenBank Accession No. NM_{—}006274) (CCL19 polypeptide SEQ ID NO: 273, CCL19 cDNA SEQ ID NO: 274); CXCL9 (amino acids 23-125 of GenBank Accession No. NM_{—}002416) (CXCL9 polypeptide SEQ ID NO: 275, CXCL9 cDNA SEQ ID NO: 276); CXCL10 (amino acids 22-98 of GenBank Accession No. NM_{—}001565) (CXCL10 polypeptide SEQ ID NO: 277, CXCL10 cDNA SEQ ID NO: 278); CXCL11 (amino acids 22-94 of GenBank Accession No. NM_{—}005409) (CXCL1 I polypeptide SEQ ID NO: 323, CXCL11 cDNA SEQ ID NO: 324) or cytokine IFNγ (amino acids 21-166 of GenBank Accession No. NM_{—}000619) (IFNγ polypeptide SEQ ID NO: 279, IFNγ cDNA SEQ ID NO: 280), amplified by PCR, respectively, from Image clones No. 1707527 (hCCL19) with primers CCL19-1 (5′-GCGGAATCATGGGCACCAATGATGCTGAAGACTG-3′) (SEQ ID NO: 281) and CCL19-2 (5′-GCGGGATCCTTAACTGCTGCGGCGCTTCATCTTG-3′) (SEQ ID NO: 282), No. 5228247 (hCXCL9) with primers CXCL9-1 (5′-GCCGAATTCACCCCAGTAGTGAGAAAGGGTCGCTG-3′) (SEQ ID NO: 283) and CXCL9-2 (5′-CGCGGATCCTTATGTAGTCTTCTTTTGACGAGAACGTTG-3′) (SEQ ID NO: 284), No. 4274617 (hCXCL10) with primers CXCL10-1 (5′-GCCGAATTCGTACCTCTCTCTAGAACCGTACGCTGT-3′) (SEQ ID NO: 285) and CXCL10-2 (5′-GCGGGATCCTTAAGGAGATCTTTTAGACATTTCCTTGCTA-3′) (SEQ ID NO: 286), No. 3934139 (hCXCL11) with primers CXCL11-1 (5′-GGGGAATTCTTCCCCATGTTCAAAAGAGGAC-3′) (SEQ ID NO: 325) and CXCL11-2 (5′-GGGGATCCTTAAAAATTCTTTCTTTCAAC-3′) (SEQ ID NO: 326), No. 2403734 (hIFNγ) with primers IFN-1 (5′-GCGGAATCATGTGTTACTGCCAGGACCCATATG-3′) (SEQ ID NO: 287) and IFN-2 (5′-GCGGGATCCTTACTGGGATGCTCTTCGACCTTG-3′) (SEQ ID NO: 288). The PCR products were digested with EcoRI and BamHI, and cloned between EcoRI and BamHI cloning sites of vector pGBKT7 (Clontech). Positive two-hybrid interaction of THAP1 was observed with chemokines CCL21, CCL19, CXCL9 and CXCL11 while chemokine CXCL10 gave an intermediate result (+/−) in this two-hybrid assay (see FIG. 19). The negative cytokine control, IFNγ, did not have a positive interaction.

[1401] It will be appreciated that the above-described methods can be used to determine whether any particular chemokine binds to any THAP-family polypeptide. For example, cDNAs encoding THAP-family members THAP1 to THAP11 as well as THAP0 from humans and other species can be cloned into a first component vector of a two hybrid system. cDNAs encoding chemokines can be cloned into a second component vector of a two hybrid system. The two vectors can be transformed into an appropriate yeast strain, wherein the polypeptides are expressed and tested for interaction. For example, chemokine CCLS (polypeptide SEQ ID NO: 289, cDNA SEQ ID NO: 290) can be tested for interaction with full-length THAP-1 or particular portions of THAP1, such as a nested deletion series. Chemokines which can be tested for interaction with THAP-family proteins include, but are not limited to, XCL1, XCL2, CCL1, CCL2, CCL3, CCL3L1, SCYA3L2, CCL4, CCL4L, CCL5, CCL6, CCL7, CCL8, SCYA9, SCYA10, CCL11, SCYA12, CCL13, CCL14, CCL15, CCL16, CCL17, CCL18, CCL19, CCL20, CCL21, CCL22, CCL23, CCL24, CCL25, CCL26, CCL27, CCL28, clone 391, CARP CC-1, CCL1, CK-1, regakine-1, K203, CXCL1, CXCL1P, CXCL2, CXCL3, PF4, PF4V1, CXCL5, CXCL6, PPBP, SPBPBP, IL8, CXCL9, CXCL10, CXCL11, CXCL12, CXCL14, CXCL15, CXCL16, NAP-4, LFCA-1, Scyba, JSC, VHSV-induced protein, CX3CL1 and fCL1.

### Example 33

### In Vitro THAP1/Chemokine Interaction Assay

[1402] To confirm the interaction observed in yeast two-hybrid system, we performed in vitro GST pull down assays. THAP1, expressed as a GST-tagged fusion protein and immobilized on glutathione sepharose, was incubated with radiolabeled chemokines that were translated in vitro.

[1403] To generate the GST-THAP1 expression vector, the full-length coding region of THAP1 (a nucleic acid encoding amino acids 1-213 of THAP1) was amplified by PCR from HEVEC cDNA with primers 2HMR8 (5′-CGCGGATCCGTGCAGTCCTGCTCCGCCTACGGC-3′) (SEQ ID NO: 291 and 2HMR11 (5′-CCGAATTCTTATGCTGGTACTTCAACTATTTCAAAGTAG-3′) (SEQ ID NO: 292), digested with BamHI and EcoRI, and cloned in frame downstream of the Glutathione S-Transferase ORF, between the BamHI and EcoRI sites of the pGEX-2T prokaryotic expression vector (Amersham Pharmacia Biotech, Saclay, France). The GST-THAP1 fusion protein encoded by plasmid pGEX-2T-THAP1 and the control GST protein encoded by plasmid pGEX-2T, were then expressed in E. Coli DH5α and purified by affinity chromatography with glutathione sepharose according to supplier's instructions (Amersham Pharmacia Biotech). The yield of proteins used in GST pull-down assays was determined by SDS-Polyacrylamide Gel Electrophoresis (PAGE) and Coomassie blue staining analysis.

[1404] In vitro-translated chemokines were generated with the TNT-coupled reticulocyte lysate system (Promega, Madison, Wis., USA) using as templates pGBKT7-CCL21, -CCL19, -CXCL9, -CXCL10 and CXCL11 chemokine vectors (see Example 32) or pCMV-SPORT6-CCL5 plasmid (Image clone No. 4185200). In vitro-translated IFNγ cytokine was generated similarly using as template plasmid pGBKT7-IFNγ. A 25 μvolume of ³⁵S-labelled chemokine was incubated with immobilized GST-THAP1 or GST proteins overnight at 4° C., in the following binding buffer: 10 mM NaPO4 pH 8.0, 140 mM NaCl, 3 mM MgCl₂, 1 mM dithiothreitol (DTT), 0.05% NP40, and 0.2 mM phenylmethyl sulphonyl fluoride (PMSF), 1 mM Na vanadate, 50 mM β-glycerophosphate, 25 μg/ml chymotrypsine, 5 μg/ml aprotinin, and 10 μg/ml leupeptin. Beads were then washed 5 times in 1 ml binding buffer. Bound proteins were eluted with 2×Laemmli SDS-PAGE sample buffer, fractionated by 10% SDS-PAGE and visualized by fluorography using Amplify (Amersham Pharmacia Biotech). GST/THAP1 specifically bound to chemokines CCL21, CCL19, CCL5, CXCL9, CXCL10 and CXCL11 but not cytokine IFNγ (FIGS. 19 and 20). FIG. 19 shows that CCL21, CCL19, CCL5, CXCL9 and CXCL11 all strongly bound to immobilized GST-THAP1 (indicated by +++ in the column labelled “In vitro binding to GST-THAP1”). CXCL10 also bound to immobilized GST-THAP1 (indicated by ++ in the column labelled “In vitro binding to GST-THAP1”). The cytokine IFNγ did not bind to immobilized GST-THAP1 (indicated by − in the column labelled “In vitro binding to GST-THAP1”). Chemokines CCL21, CCL19, CCL5, CXCL9, CXCL10 and CXCL11 failed to interact with GST beads (negative control). FIG. 20a shows that equivalent amounts of chemokine or cytokine were tested in the in vitro GST-THAP1 binding assays. FIG. 20b shows that neither the cytokine, IFNγ, nor any of the chemokines bound to immobilized GST alone. FIG. 20c shows that chemokines, CXCL10, CXCL9 and CCL19, but not the cytokine IFNγ, bound to immobilized GST-THAP1 fusions.

[1405] It will be appreciated that the above-described methods can be used to determine whether any particular chemokine binds to any THAP-family polypeptide. For example, cDNAs encoding THAP-family members THAP1 to THAP11 as well as THAP0 from humans and other species can be cloned and expressed as a GST fusion protein and immobilized to a solid support. cDNAs encoding chemokines can be translated in vitro and the resulting proteins incubated with the immobilized GST-THAP family fusions. Furthermore, a nested deletion series and/or point mutants of the THAP-family polypeptides can also be generated as GST-fusions and tested to determine the exact location of the chemokine binding domain for any THAP-family polypeptide with respect to any chemokine. Chemokines which can be tested for binding to THAP-family proteins include, but are not limited to, XCL1, XCL2, CCL1, CCL2, CCL3, CCL3L1, SCYA3L2, CCL4, CCL4L, CCL5, CCL6, CCL7, CCL8, SCYA9, SCYA10, CCL11, SCYA12, CCL13, CCL14, CCL15, CCL16, CCL17, CCL18, CCL19, CCL20, CCL21, CCL22, CCL23, CCL24, CCL25, CCL26, CCL27, CCL28, clone 391, CARP CC-1, CCL1, CK-1, regakine-1, K203, CXCL1, CXCL1P, CXCL2, CXCL3, PF4, PF4V1, CXCL5, CXCL6, PPBP, SPBPBP, IL8, CXCL9, CXCL10, CXCL11, CXCL12, CXCL14, CXCL15, CXCL16, NAP-4, LFCA-1, Scyba, JSC, VHSV-induced protein, CX3CL1 and fCL1.

### Example 34

### Chemotaxis Bioassay: Inhibition of CCL21/CCL19-Induced Chemotaxis by THAP1 Oligomeric Forms

[1406] To demonstrate inhibition of CCL21/CCL19-induced chemotaxis by THAP1 oligomers, fresh lymphocytes and a human cell line, each of which expresses the CCL21/CCL19 receptor CCR7, are assayed for a chemotactic response to chemokines in the presence or absence of oligomeric THAP1. Lymphocytes are purified from fresh heparinized human blood or mouse lymph nodes and grown in RPMI 1640 glutamax I (Invitrogen GIBCO). HuT78 cells are obtained from American Tissue Type Culture Collection (Accession Number TIB-161) and grown in Iscove's modified Dulbecco's medium with 4 mM L-Glutamine adjusted to contain 1.5 g/l sodium bicarbonate (Invitrogen GIBCO). Recombinant CCL21 and CCL19 human chemokines are obtained from commercial suppliers (for example, R&D or Chemicon).

[1407] Chemokine CCL21 or CCL19 is diluted in the appropriate culture medium without serum at 20 ng/ml and 75 μl of this solution is transferred in appropriated wells of a 96-well microplate. Recombinant human THAP1 oligomers (GST-THAP1 or Fc-THAP1 chimera) are serially diluted starting at 500 nM and 25 μl of the different dilutions are transferred in appropriate wells. Transwells are set carefully on each well and 100 μl of a cell suspension at 8.10⁶ cell/ml is added in the upper chamber. Following a 4-hour incubation at 37° C. and 5% CO₂, the cells which have migrated to the lower chamber are quantified using the Celltiter Glo system (Promega). A staining of the filter is also performed to verify that no cells adhered to the lower side of the filter after the migration. The degree of CCL21/CCL19 induced chemotaxis inhibition by THAP1 oligomeric forms is calculated by comparing the number of cells which have migrated in the presence or absence of the THAP1 oligomeric forms.

### Example 35

### Inhibition of CCL21/CCL 19-Induced Lymphocyte Adhesion to Endothelial Cells In Vivo by THAP1 Oligomeric Forms

[1408] The capacity of THAP1 oligomeric forms to block the activity of CCL21/CCL19 in vivo, including CCL21/CCL19-induced lymphocyte adhesion to endothelial cells, is assessed by measuring the rolling/sticking phenotype of lymphocytes in mouse lymph nodes HEVs (High endothelial venules) using intravital microscopy (microscopy on live animals) as described in von Andrian (1996) Microcirculation (3):287-300; and von Andrian U H, M'Rini C. (1998) Cell Adhes Commun. 6(2-3):85-96), the disclosures of which are incorporated herein by reference in their entireties. The rolling/sticking assay is performed as follows. In brief, the different steps of lymphocyte migration through HEVs (tethering, rolling, sticking, transendothelial migration) are analyzed by intravital microscopy in mice treated with recombinant human THAP1 oligomers (GST-THAP1 or Fc-THAP1 chimera). For observation of lymph nodes, HEVs vessels (and adhesion processes occurring in these vessels) by intravital microscopy, a microsurgical exposition of the subiliac (superficial inguinal) lymph node is made on an anaesthetized mouse. Briefly, BALB/c mice (Charles River, St Germain sur l'Arbresle, France) are anesthetized by intraperitoneal injection of 5 mg/mL ketamine and 1 mg/mL xylasine (10 mL/kg) and surgically prepared under a stereomicroscope (Leica Microsystems SA, Rueil-Malmai son, France) to allow exposure of the node vessels. A catheter is inserted in the contralateral femoral artery to permit subsequent retrograde injections of fluorescent cell suspensions or recombinant THAP1 oligomeric forms (GST-THAP1 or Fc-THAP1, 10-100 μg in 250 μl saline injected and allowed to bind for 5-30 min before injection of fluorescent cell suspensions). The mouse is then transferred to an intravital microscope (INM 100; Leica Microsystems SA). Body temperature is maintained at 37° C. using a padding heater. Lymph node vessels and fluorescent cells are observed through 10× or 20× water immersion objective (Leica Microsystems SA) by transillumination or epifluorescence illumination. Transilluminated and fluorescent events are visualized using a silicon-intensified target camera (Hamamatsu Photonics, Massy, France) and recorded for later off-line analysis (DSR-11 Sony, IEC-ASV, Toulouse). Lymphocyte behavior in lymph node vessels is analyzed off-line as previously described (von Andrian (1996) Microcirculation (3):287-300; and von Andrian U H, M'Rini C. (1998) Cell Adhes Commun. 6(2-3):85-96). Briefly, the rolling fraction is determined in every visible lymph node HEV as the percentage of lymphocytes interacting with the endothelial lining over the total cell number entering the venule during an observation period. Rolling cells that become subsequently adherent are included in the rolling fraction. The sticking fraction is determined as percentage of rollers that becomes firmly adherent in HEVs for more than 20 seconds. Only vessels with more than 10 rolling cells are included. The degree of inhibition of CCL21/CCL19-induced lymphocyte adhesion by THAP1 oligomers in vivo is calculated by comparing the number of lymphocytes sticking to endothelial cells (sticking fractions) in the presence or absence of the THAP1 oligomeric forms.

### Example 36

### Use of THAP1 Oligomeric Forms to Antagonize Chemokines in a Mouse Model of Rheumatoid Arthritis

[1409] This experiment is designed to test effect of antagonizing chemokines with THAP1 oligomeric forms in a mouse model of rheumatoid arthritis, the well-known collagen-induced arthritis model. In each experiment, male DBA/1 mice are immunized with collagen on day 21 and are boosted on day 0. Mice are treated daily from days 0-14 with IP injections of THAP1 oligomeric forms (GST-THAP1 or THAP1-Fc chimera) at 150, 50, 15, and 5 μg/day, and compared to mice treated with control proteins (GST or human IgG1), at 150 μg/day (n=15/group in each experiment). The incidence and severity of arthritis is monitored in a blind study. Each paw is assigned a score from 0 to 4 as follows: 0=normal; 1=swelling in 1 to 3 digits; 2=mild swelling in ankles, forepaws, or more than 3 digits; 3=moderate swelling in multiple joints; 4=severe swelling with loss of function. Each paw is totaled for a cumulative score/mouse. The cumulative scores are then totaled for mice in each group for a mean clinical score. Groups of 15 mice are treated with the indicated doses of THAP1-Fc or with 150 μg/day of human IgG1. The capacity of THAP1 oligomeric forms (GST-THAP1 or THAP1-Fc chimera) to reduce the disease incidence and severity of arthritis is determined by comparison with the control group.

### Example 37

### Use of THAP1 Oligomeric Forms to Antagonize Chemokines in a Mouse of Inflammatory Bowel Disease

[1410] The effect of blocking chemokines with THAP1-Fc chimera is analyzed in an experimentally induced model of Inflammatory Bowel Disease (IBD). One of the most widely used models of IBD is the DSS model (dextran sulphate salt). In this model, dextran sulphate salt (M.W. typically about 40,000 but molecular weights from 40,000 to 500,000 can be used) is given to mice (or other small mammals) in their drinking water at 2% to 8%. In some studies, C57BL/6 mice are given 2% DSS from day 0 to day 7 (D0-D7), wherein the number of mice per group equals four (n=4). The study groups are divided as follows: No DSS+human IgG1 (250 μg/day/mouse D0-D7); 2% DSS+THAP1-Fc (100 μg/day/mouse D0-D7); 2% DSS+THAP1-Fc (250 μg/day/mouse D0-D7); 2% DSS+THAP1-Fc (500 μg/day/mouse D0-D7); 2% DSS+human IgG1 (250 μg/day/mouse D0-D7). Mice are weighed daily. Weight loss is a clinical sign of the disease. Tissues are harvested at day 8 (D8). Histopathology is performed on the following tissues: small intestine, large intestine and mesenteric lymph nodes (MLN). The capacity of the THAP1-Fc chimera, to attenuate some of the weight loss associated with DSS-induced colitis, and to reduce inflammation in the large intestine is determined by comparing mice treated with THAP1-Fc to mice treated with control human IgG1.

### Example 38

### THAP1 Expression is Linked to Cell Proliferation

[1411] To investigate the subcellular localization of endogenous THAP1, human primary endothelial cells from umbilical vein (HUVEC, PromoCell, Heidelberg, Germany) were analyzed by indirect immunofluorescence with anti-THAP1 specific antibodies. Anti-THAP1 antibodies (anti-THAP antisera) were generated in rabbits against a peptide derived from the THAP domain of human THAP1, AVRRKNFKPTKYSSIC (amino acids 39-54 in SEQ ID: 3), and affinity-purified against the corresponding peptide (Custom polyclonal antibody production, Eurogentec).

[1412] Endothelial cells were allowed to grow for 24 h to 48 h on coverslips. Cells were fixed in methanol for 5 min at −20° C., followed by incubation in cold acetone at −20° C. for 30 sec. Cells were then blocked with PBS-BSA (PBS with 1% bovine serum albumin) for 10 min and then incubated 2 hr at room temperature with the rabbit polyclonal anti-THAP antibodies diluted in PBS-BSA (1/40). Cells were then washed three times 5 min at room temperature in PBS-BSA, and incubated for 1 hr with Cy3 (red fluorescence)-conjugated goat anti-rabbit IgG (1/1000, Amersham Pharmacia Biotech) secondary antibodies, diluted in PBS-BSA. Nuclei were revealed by staining with DAPI (4,6-Diamidino-2-phenylindole; 0.2 μg/ml, 10 min at room temperature). After extensive washing in PBS, samples were air dried and mounted in Mowiol. Images were collected on a Leica confocal laser scanning microscope. To verify the specificity of the immunostaining, in some experiments, the anti-THAP antibodies were pre-incubated with 2.5 ug/ml of the THAP antigenic peptide AVRRKNFKPTKYSSIC (SEQ ID NO: 293) or 2.5 ug/ml of a control peptide (QVEKLRKKLKTAQQRC (SEQ ID NO: 294).

[1413] This analysis revealed that expression of the endogenous THAP1 protein is linked to cell proliferation with very low or no expression in quiescent cells and high levels of expression in mitotic cells. Specifically, the micrographs showed that in primary human endothelial cells, expression of THAP1 was linked to the proliferation status of the cells and was preferentially observed in mitotic dividing cells. This immunostaining of mitotic cells with anti-THAP antibodies was specific since it was also observed in the presence of a control peptide but not after blocking with the THAP antigenic peptide.

### Example 38B

### Cell Cycle Specific Expression of THAP1 in S/G2-M Phases

[1414] To investigate the subcellular localization of endogenous THAP1 during the cell cycle, human U2OS osteosarcorna cells (ATCC) were analyzed by indirect immunofluorescence with anti-THAP1 specific antibodies (see Example 38).

[1415] U2OS cells were allowed to grow for 24 hours on coverslips, then synchronized in different phases of the cell cycle by treatment with cell cycle inhibitors, aphidicoline (G1/S phase block, 1 μg/ml for 24 h, Sigma ref A0781) or nocodazole (M phase block, 100 ng/ml for 24 h, Sigma ref M1404). Cells in G1 phase were obtained 14 h after release from the nocodazole block while cells in S and G2 phases were obtained 3 h or 6 h, respectively, after release from the aphidicolin block. Cells were fixed in methanol for 5 min at −20° C., followed by incubation in cold acetone at −20° C. for 30 sec. Cells were then blocked with PBS-BSA (PBS with 1% bovine serum albumin) for 10 min and then incubated 2 hr at room temperature with the rabbit polyclonal anti-THAP antibodies diluted in PBS-BSA (1/40). Cells were then washed three times 5 min at room temperature in PBS-BSA, and incubated for 1 hr with Cy3 (red fluorescence)-conjugated goat anti-rabbit IgG (1/1000, Amersham Pharmacia Biotech) secondary antibodies, diluted in PBS-BSA. Nuclei were revealed by staining with DAPI (4,6-diamidino-2-phenylindole; 0.2 μg/ml, 10 min at room temperature). After extensive washing in PBS, samples were air dried and mounted in Mowiol. Images were collected on a Leica confocal laser scanning microscope. To verify the specificity of the immunostaining, in some experiments, the anti-THAP antibodies were pre-incubated with 2.5 ug/ml of the THAP antigenic peptide AVRRKNFKPTKYSSIC (SEQ ID NO: 293) or 2.5 ug/ml of a control peptide (QVEKLRKKLKTAQQRC (SEQ ID NO: 294).

[1416] This analysis revealed that expression of the endogenous THAP1 protein in the nucleus is cell cycle dependent. Specifically, the micrographs showed that in human U2OS osteosarcoma tumor cells, expression of THAP1 was linked to the proliferation status of the cells and was specifically observed in S/G2-M phases of the cell cycle. This immunostaining of cells in S/G2-M phases of the cell cycle with anti-THAP antibodies was specific since it was also observed in the presence of a control peptide but not after blocking with the THAP antigenic peptide.

### Example 39

### THAP1 Modulates Transcription

[1417] To analyze the effects of THAP1 in transcriptional regulation, Gal4-luciferase reporter assays were performed. The method is carried out essentially as described in Vandel et al. (2001) Mol Cell Biol 21:6484-6494, and Vaute et al. (2002) Nucleic Acids Res 30:475-481. The full-length coding region of THAP1 (amino acids 1-213) was amplified by PCR from HEVEC cDNA with primers THAP1-Gal4.1 (5′-CCGAATTCAGGATGGTGCAGTCCTGCTCCGCCT-3′) (SEQ ID NO: 295) and THAP1-Gal4.2 (5′-GCGCTCTAGATTATGCTGGTACTTCAACTATTTCAAAGTAG-3′) (SEQ ID NO: 296), digested with EcoRI and XbaI, and cloned in frame downstream of the Gal4 DNA-binding domain (DBD), between the EcoRI and XbaI sites of the pCMV-Gal4 expression vector (Vandel et al. (2001) Mol Cell Biol 21:6484-6494; Vaute et al. (2002) Nucleic Acids Res 30:475-481), to generate pCMV-Gal4/THAP1 expression vector. Increasing amounts of the pCMV-Gal4/THAP1 or pCMV-Gal4 expression vectors (0.025 mg, 0.05 mg, 0.1 mg, 0.2 mg, 0.5 mg, 1 mg of plasmid DNA) were co-transfected in COS7 cells, together with a pBS-luciferase reporter plasmid (plasmid Gal4-M2-luc, 2 mg) containing four Gal4-UAS upstream of the luciferase reporter gene, and a pCMV-lacZ (0.5 mg) coding for β-galactosidase. A pCMV-Gal4/Suv39H1 plasmid, encoding the transcriptional repressor Suv39H1 (Vandel et al. (2001) Mol Cell Biol 21:6484-6494; Vaute et al. (2002) Nucleic Acids Res 30:475-481), was used as a control for transcriptional repression. 48 h after transfection, luciferase activity was measured using a luciferase reporter assay kit (Roche). Dosage of β-galactosidase was used to standardize transfection efficiencies.

[1418] These Gal4-luciferase reporter assays revealed that THAP1 is able to modulate transcription (FIGS. 21A and 21B) and exhibits transcriptional repressor properties similar to those of the transcriptional repressor Suv39H1 (Vandel et al. (2001) Mol Cell Biol 21:6484-6494; Vaute et al. (2002) Nucleic Acids Res 30:475-481).

### Example 40

### Analysis of the Subcellular Localization of Chemokine SLC/CCL21

[1419] To analyze the subcellular localization of the SLC/CCL21 protein, the cDNA encoding the mature form of human SLC/CCL21 (amino acids 24-134 of SEQ ID NO: 119) (GenBank Accession Number NP_{—}002980) is cloned in frame downstream of the Enhanced Green Fluorescent Protein (EGFP) ORF in pEGFP.C2 vector (Clontech). The pEGFP.C2-SLC/CCL21 vector is generated by subcloning the BamHI SLC/CCL21 fragment from pGBKT7-SLC/CCL21 (see example 15) into the unique BamHI cloning site of vector pEGFPC2 (Clontech). The GFP-SLC/CCL21 expression construct is then transfected into human primary endothelial cells from umbilical vein (HUVEC, PromoCell, Heidelberg, Germany). HUVEC are grown in complete ECGM medium (PromoCell, Heidelberg, Germany), plated on coverslips and transiently transfected in RPMI medium using GeneJammer transfection reagent according to manufacturer instructions (Stratagene, La Jolla, Calif., USA). Analysis by fluorescence microscopy 24 hours later reveals that the GFP-SLC/CCL21 fusion protein localizes in the nucleus while GFP alone exhibits only a diffuse staining over the entire cell.

[1420] To investigate the subcellular localization of endogenous SLC/CCL21, immunohistochemistry with anti-SLC/CCL21 antibodies is performed on human tissue sections. Tissue specimens of fresh palatine tonsils are embedded in OCT compound (TissueTek, Elkhart, Ind.) and then snap-frozen in liquid nitrogen. Cryosections (6 μm) are air-dried overnight, and acetone fixed (10 min, −20° C.). Following one PBS wash, sections are treated 5 min at room temperature in PBS containing 0.1% Triton-X100, and washed again with PBS. The tissue sections are then incubated with a mixture of rabbit polyclonal antibodies against human SLC/CCL21 (1/100, Chemicon, USA) followed by a mixture of Cy3-conjugated goat anti-rabbit IgG (1/1000, Amersham Pharmacia Biotech) secondary antibodies, diluted in PBS-BSA. Nuclei are revealed by staining with DAPI (4,6-diamidino-2-phenylindole; 0.2 μg/ml, 10 min at room temperature). After extensive washing in PBS, samples are air dried and mounted in Mowiol. Microscopy is performed with a Nikon Eclipse TE300 fluorescence microscope equipped with a Nikon digital camera DXM1200 (Nikon Corp., Tokyo, Japan).

[1421] Experiments similar to those described above were performed in HeLa cells and GFP-SLC was shown to localize to the nucleus. FIG. 27A shows areas of localization of GFP-SLC which correspond to nuclei as shown by DAPI counterstain (FIG. 27B).

### Example 40B

### Analysis of the Subcellular Localization of Chemokine MIG/CXCL9

[1422] To analyze the subcellular localization of the MIG/CXCL9 protein, the cDNA encoding the mature form of human MIG/CXCL9 (amino acids 23-125 of GenBank Accession No. NM_{—}002416) (CXCL9 polypeptide SEQ ID NO: 275, CXCL9 cDNA SEQ ID NO: 276) is cloned in frame downstream of the Enhanced Green Fluorescent Protein (EGFP) ORF in pEGFP.C2 vector (Clontech). The pEGFP.C2-MIG/CXCL9 vector is generated by subcloning the EcoRI-BamHI MIG/CXCL9 fragment from pGBKT7-MIG/CXCL9 (see example 32) between the EcoRI-BamHI cloning sites of vector pEGFPC2 (Clontech). The GFP-MIG/CXCL9 expression construct is then transfected into human primary endothelial cells from umbilical vein (HUVEC, PromoCell, Heidelberg, Germany) or human immortalized Hela cells. HUVEC are grown in complete ECGM medium (PromoCell, Heidelberg, Germany), plated on coverslips and transiently transfected in RPMI medium using GeneJammer transfection reagent according to manufacturer instructions (Stratagene, La Jolla, Calif., USA). Human Hela cells (ATCC) were grown in Dulbecco's Modified Eagle's Medium supplemented with 10% Fetal Calf Serum and 1% Penicillin-streptomycin (all from Life Technologies, Grand Island, N.Y., USA), plated on coverslips, and transiently transfected with calcium phosphate method using 2 μg pEGFPC2-MIG/CXCL9 plasmid. Analysis of transfected HUVEC or Hela cells by fluorescence microscopy 24 hours later revealed that the GFP-MIG/CXCL9 fusion protein, similarly to GFP-SLC/CCL21 localizes in the nucleus while GFP alone exhibits only a diffuse staining over the entire cell.

[1423] Experiments similar to those described above were performed in HeLa cells and GFP-MIG was shown to localize to the nucleus. FIG. 27C shows areas of localization of GFP-MIG which correspond to nuclei as shown by DAPI counterstain (FIG. 27D).

### Example 40C

### CXCR3-dependent Nuclear Translocation of Chemokine MIG/CXCL9

[1424] To demonstrate the capacity of secreted chemokine MIG/CXCL9 to undergo CXCR3-dependent nuclear translocation, the cDNA encoding the full length form of human MIG/CXCL9 (amino acids 1-125 of GenBank Accession No. NM_{—}002416) (CXCL9 polypeptide SEQ ID NO: 275, CXCL9 cDNA SEQ ID NO: 276) was amplified by PCR from Image clone No. 5228247 with primers CXCL9-3 (5′-CCGAATTCCCACCATGAAGAAAAGTGGTGTTCTTT-3′) (SEQ ID NO: 327) and CXCL9-4 (5′-CCGGATCCTGTAGTCTTCTTTTGACGAGAACGTTG-3′) (SEQ ID NO: 328), digested with EcoRI and BamHI, and cloned between EcoRI and BamHI cloning sites of vector pFLAG-CMV-5a (Sigma) to generate the phMIG-Flag expression vector. The CXCR3 expression vector pEF-CXCR3 was generated by cloning the full length CXCR3 cDNA (amino acids 1-368 of GenBank Accession No. NM_{—}001504) (CXCR3 polypeptide SEQ ID NO: 304, CXCR3 cDNA SEQ ID NO: 305), amplified by PCR from Image clone No. 5176136 with primers 5′Xba-CXCR3 (5′-CCTCTAGACCACCATGGTCCTTGAGGTGAGTGAC-3′) (SEQ ID NO: 329) and 3′Not-CXCR3 (5′-CCCGCGGCCGCTCACAAGCCCGAGTAGGAGGC-3′) (SEQ ID NO: 330), between the XbaI and NotI sites of the pEF-BOS expression vector (Mizushima and Nagata, Nucleic Acids Research, 18:5322, 1990). The phMIG-Flag expression construct was then transfected into human U2OS osteosarcoma cancer cells. Human U2OS cells (ATCC) were grown in Dulbecco's Modified Eagle's Medium supplemented with 10% Fetal Calf Serum and 1% Penicillin-streptomycin (all from Life Technologies, Grand Island, N.Y., USA), plated on coverslips, and transiently transfected with calcium phosphate method using 2 μg phMIG-Flag plasmid together with pEF-CXCR3 or pEF-Bos control vector. U2OS cells co-transfected with phMIG-Flag and pEF-CXCR3 or pEF-Bos expression vectors were analysed 48 h later by fluorescence microscopy. Cells were washed twice with PBS, fixed for 15 min at room temperature in PBS containing 3.7% formaldehyde, and washed again with PBS prior to neutralization with 50 mM NH₄Cl in PBS for 5 min at room temperature. Following one more PBS wash, cells were permeabilized 5 min at room temperature in PBS containing 0.1% Triton-X100, and washed again with PBS. Permeabilized cells were then blocked with PBS-BSA (PBS with 1% bovine serum albumin) for 10 min and then incubated 2 hr at room temperature with rabbit polyclonal antibodies anti-Flag epitope (1/200, Sigma) and mouse monoclonal antibody anti-CXCR3 (mouse IgG1, 1/200, R&D) diluted in PBS-BSA. Cells were then washed three times 5 min at room temperature in PBS-BSA, and incubated for 1 hr with Cy3 (red fluorescence)-conjugated goat anti-rabbit IgG (1/1000, Amersham Pharmacia Biotech) and FITC-labeled goat anti-mouse-IgG (1/40, Zymed Laboratories Inc., San Francisco, Calif., USA) secondary antibodies, diluted in PBS-BSA. After extensive washing in PBS, samples were air dried and mounted in Mowiol. Images were collected on a Leica confocal laser scanning microscope. The FITC (green) and Cy3 (red) fluorescence signals were recorded sequentially for identical image fields to avoid cross-talk between the channels.

[1425] In cells co-transfected with phMIG-Flag and pEF-CXCR3 expression vectors, hMIG-Flag was found to accumulate in the nucleus of the majority of transfected cells (FIGS. 28A-D and 29A-C). Nuclear localization of MIG-Flag was specifically observed in CXCR3-positive cells (FIG. 29A-C) and was not found in cells co-transfected with the pEF-Bos control vector (FIG. 28A-D). These results demonstrated that chemokine receptor CXCR3 plays an essential role in nuclear translocation of secreted chemokine MIG.

### Example 41

### The THAP1/SLC-CCL21 Complex Modulates Transcription

[1426] To analyze the effects of SLC/CCL21 and the THAP1/SLC-CCL21 complex in transcriptional regulation, Gal4-luciferase reporter assays are performed essentially as described in Example 39. The SLC/CCL21 expression vector used in these transcription assays (pEF-SLC/CCL21) is generated by PCR. A cDNA encoding the mature form of human SLC/CCL21 (amino acids 24-134 of SEQ ID NO: 119) (GenBank Accession Number NP_{—}002980), is amplified by PCR from HEVEC RNA with primers hSLC.Xba (5′-GCGTCTAGAATGAGTGATGGAGGGGCTCAGGACTGTTG-3′) (SEQ ID NO: 297) and hSLC.Not (5′-GGGCGGCCGCCTATGGCCCTTTAGGGGTCTGTGACCGC-3′) (SEQ ID NO: 298), digested with XbaI and NotI, and cloned into the XbaI and NotI sites of the pEF-BOS expression vector (Mizushima and Nagata, Nucleic Acids Research, 18:5322, 1990).

[1427] Increasing amounts of the pEF-SLC/CCL21 plasmid (0.025 mg, 0.05 mg, 0.1 mg, 0.2 mg, 0.5 mg, 1 mg of plasmid DNA) are co-transfected in COS7 cells, together with pCMV-Gal4/THAP1 or pCMV-Gal4 expression vectors (0.5 mg), a pBS-luciferase reporter plasmid (plasmid Gal4-M2-luc, 2 mg) containing four Gal4-UAS upstream of the luciferase reporter gene, and a pCMV-lacZ (0.5 mg) coding for β-galactosidase. Forty-eight hours after transfection, luciferase activity is measured using a luciferase reporter assay kit (Roche). Dosage of β-galactosidase is used to standardize transfection efficiencies.

[1428] These Gal4-luciferase reporter assays should reveal that SLC/CCL21 is able to modulate transcriptional activity of THAP1, indicating a role for the THAP1/SLC-CCL21 complex in transcriptional regulation (FIG. 22A).

[1429] Similar to other cytokines such as IFNγ (Bader and Wietzerbin (1994) PNAS 91:11831-11835; Subramaniam et al. (1999) J Biol Chem 274 :403-407) and growth factors such as FGF2 (Baldin et al. (1990) EMBO J 9 :1511-1517), the basic SLC/CCL21 chemokine may be internalized and translocated to the nucleus, where it may associate with THAP1 and modulate (stimulate or inhibit) transcription of specific target genes. Target genes of THAP1 and THAP1/SLC complex can include genes involved in cell proliferation and cell differentiation, particularly endothelial cell differentiation and endothelial or cancer cell proliferation.

[1430] It will be appreciated that the above-described methods can be used to determine whether any particular THAP1/chemokine complex or THAP-family polypeptide/chemokine complex has the ability to modulate transcription. For example, cDNAs encoding THAP-family members THAP1 to THAP11 as well as THAP0 from humans and other species can be cloned in an expression vector such as pCMV-Gal4, the desired chemokine is cloned into the expression vector pEF-BOS and the expression constructs are then either transfected separately or cotransfected into COS7 cells comprising a pBS-luciferase reporter plasmid. Luciferase assays are performed as described above.

[1431] Chemokines which can be tested in combination with THAP1 or other THAP-family polypeptides for their ability to modulate transcription include, but are not limited to, XCL1, XCL2, CCL1, CCL2, CCL3, CCL3L1, SCYA3L2, CCL4, CCL4L, CCL5, CCL6, CCL7, CCL8, SCYA9, SCYA10, CCL11, SCYA12, CCL13, CCL14, CCL15, CCL16, CCL17, CCL18, CCL19, CCL20, CCL21, CCL22, CCL23, CCL24, CCL25, CCL26, CCL27, CCL28, clone 391, CARP CC-1, CCL1, CK-1, regakine-1, K203, CXCL1, CXCL1P, CXCL2, CXCL3, PF4, PF4V1, CXCL5, CXCL6, PPBP, SPBPBP, IL8, CXCL9, CXCL10, CXCL11, CXCL12, CXCL14, CXCL15, CXCL16, NAP-4, LFCA-1, Scyba, JSC, VHSV-induced protein, CX3CL1 and fcL1.

[1432] In experiments conducted using MIG and THAP1, it was shown that MIG/THAP1 complexes could modulate gene transcription (see FIG. 22B and Example 47).

### Example 42

### Fucosyltransferase TVII is a Target Gene of THAP1 and/or the THAP1/SLC-CCL21 Complex

[1433] Since chemokine SLC/CCL21 has been shown to induce the high endothelial venule phenotype in endothelial cells (Fan et al. (2000) J Immunol 164:3955-3959; Grant et al. (2002) Am J Pathol 2002 160:1445-55; Yoneyama et al. (2001) J Exp Med 193:35-49), we searched for target genes of the THAP1/SLC-CCL21 among the few high endothelial venule-specific genes that have been described. This analysis led to the identification of many THAP domain recognition sequences in the promoter of the human Fucosyltransferase TVII gene (FIG. 23), one of the key high endothelial venules enzymes for lymphocyte recruitment (Smith et al. (1996) J Biol Chem 271:8250-8259; Maly et al. (1996) Cell 86:643-653).

[1434] To confirm that the Fucosyltransferase TVII promoter is a target of THAP1 and/or the THAP1/SLC-CCL21 complex, transcription assays are performed with luciferase reporter genes under the control of the FucTVII promoter. The FucTVII promoter (nucleotides 650-950, GenBank Accession Number AB012668) is amplified by PCR from human genomic DNA with primers FucTVII-1 (5′-GCGCTCGAGCTGCACCTGGGCCTTCTCTGCCCTGG-3′) (SEQ ID NO: 299) and FucTVII-2 (5′-CGAAGCTTACTGTGCTCCTTTTATCTCTGCCCAAG-3′) (SEQ ID NO: 300), digested with XhoI and HindIII, and cloned in the same sites of the pGL3-Basic luciferase reporter plasmid (Promega) to generate pGL3-proFucTVII-luc.

[1435] To analyze the effects of SLC/CCL21 and the THAP1/SLC-CCL21 complex on the FucTVII promoter, luciferase reporter assays are performed essentially as described in Example 39. Increasing amounts of the pEF-SLC/CCL21 and/or pEGFPC2-THAP1 plasmid (0.025 mg, 0.05 mg, 0.1 mg, 0.2 mg, 0.5 mg, 1 mg of plasmid DNA ) are co-transfected in COS7 cells, together with the pGL3-proFucTVII-luciferase reporter plasmid, and pCMV-lacZ (0.5 mg) coding for β-galactosidase. Forty-eight hours after transfection, luciferase activity is measured using a luciferase reporter assay kit (Roche). Dosage of β-galactosidase is used to standardize transfection efficiencies.

[1436] These luciferase reporter assays with the pGL3-proFucTVII-luciferase reporter plasmid reveals that THAP1, SLC/CCL21 and the THAP1/SLC-CCL21 complex are able to modulate transcriptional activity of the FucTVII promoter, indicating that the human Fucosyltransferase TVIIgene is a target of THAP1 and the THAP1/SLC-CCL21 complex, further confirming the role of the THAP1/SLC-CCL21 complex in transcriptional regulation.

### Example 43

### Retrovirus Mediated Expression of THAP1 and Chemokines SLC/CCL21 and MIG/CXCL9 in Primary Human Endothelial Cells

[1437] Background: The method described below uses retroviral derived vectors to transduce at high efficiency human primary umbilical vein endothelial cells (HUVEC) with THAP1, SLC/CCL21, MIG/CXCL9 or any other gene of interest. This retroviral packaging system includes retroviral packaging plasmids and packagable vector transcripts that are produced from high expression plasmids after transient tri-transfection in mammalian cells. High titers of recombinant retroviruses are produced in these transfected mammalian cells and can then transduce a mammalian target cell, so-called HUVEC, by fresh supernatant infection at high efficiency. This method is useful for the rapid production of high titer viral supernatants to transduce with high efficiency cells that are refractory to transduction by conventional means such as simple transfection. The transduction protocol in primary HUVEC has been optimized with a MLV-derived vector encoding enhanced green fluorescent protein (eGFP) to determine the optimal infection conditions.

[1438] The retroviral constructs are packaging plasmids consisting of at least one retroviral helper DNA sequence derived from a replication-incompetent retroviral genome encoding in trans all virion proteins required to package a replication incompetent retroviral vector, and for producing virion proteins capable of packaging the replication-incompetent retroviral vector at high titer, without the production of replication-competent helper virus. The retroviral DNA sequence lacks the region encoding the native enhancer and/or promoter of the viral 5′LTR of the virus, and lacks both the psi function sequence responsible for packaging helper genome and the 3′LTR, but encodes the foreign β-globin polyadenylation site. The retrovirus is a leukemia virus, the Moloney Murine Leukemia Virus (MMLV). The foreign enhancer and promoter is the human cytomegalovirus (HCMV) immediate early (IE) enhancer and promoter. The retroviral packaging plasmid consists of two retroviral helper DNA sequences encoded by plasmid based expression vectors, for example where a first helper sequence contains a cDNA encoding the gag and pol proteins of ecotropic MMLV and a second helper sequence contains a cDNA encoding the env protein. The Env gene, which determines the host range, is derived from the Vesicular Stomatitus Virus (VSV) G protein.

[1439] Plasmid constructions: MLV retroviral vectors were based on MoMLV derived vector called pCFB from Stratagene where the U3 region of the 5′LTR were replaced by the enhancer/promoter of the cytomegalovirus immediate early (CMV IE) gene. The multi-cloning site was modified by incorporation of synthetic oligonucleotides 5′-GGCATTCAATTGCTCGAGTTTAAACGCGGCCGCG-3′ (SEQ ID NO: 331) and 5′-AATCCGCGGCCGCGTTTAAACTCGAGCAATTGAATGCC-3′ (SEQ ID NO: 332) containing the NaeI and MfeI restriction sites and replacing nucleotides from position 1742 to 2244 of the pCFB plasmid. The modified vector was called pMLV-MCS. The pVSVG plasmid encoding the VSVG envelope and the pGAGPOL plasmid encoding gag and pol genes have been constructed as follows: VSVG and GAG-POL DNA fragments were amplified from respectively pVPack-VSV-G and pVPack-GP plasmids as templates (Stratagene) and cloned into the CMV-Pglobin intron-MCS-Pglobin polyA expression cassette following conventional cloning procedures. Primers used to amplify vsvg and gagpol fragments were respectively VSVG-5′ (5′-ATGAAGTGCCTTTTGTACTTAGCCTT-3′) (SEQ ID NO: 333) and VSVG-3′ (5′-TCATAAAAATTAAAAACTCAAATATAATTGAGG-3′) (SEQ ID NO: 334) and GAGPOL-5′ (5′-ATGGGCCAGACTGTTACCACTC-3′) (SEQ ID NO: 335) and GAGPOL-3′ (5′-TTAGGGGGCCTCGCGG-3′) (SEQ ID NO: 336).

[1440] The full length coding region of human THAP1 (SEQ ID NO: 3; amino acids 1 to 213), were amplified by PCR according to standard procedures with primers: THAP1-5′ (5′-ATGGTGCAGTCCTGCTCCGC-3′) (SEQ ID NO: 337) and THAP1-MfeI-3′ (5′-GCCAATTGTTATGCTGGTACTTCAACTATTT-3′) (SEQ ID NO: 338) using a recombinant vector containing the human THAP1 cDNA as template. The reverse primer contains an MfeI restriction site at its end to generate a 3′ overhang compatible with the 5′ end of the cleaved vector. The amplified DNA were then digested with MfeI, purified by electrophoresis on an agarose gel and the desired fragments were then cloned into the cleaved vector pMLV-MCS digested with NaeI and MfeI restriction enzymes.

[1441] Coding regions of human SLC/CCL21 (Genbank NP) and human MIG/CXCL9 (NM_{—}002416) were amplified by PCR in such a way that the amplified fragments did not contain the signal peptide localized from the nucleotide 4 to the nucleotide 66 of the full length open reading frame of both sequences. By deleting signal peptide signatures, SLC/CCL21 and MIG/CXCL9 proteins are localized into the nucleus of the cell after protein expression in the cytoplasm. Primers used were SLC-5′ (5′-ATGAGTGATGGAGGGGCTCAGG-3′) (SEQ ID NO: 339) and SLC-EcoRI-3′ (5′-GGAATTCCTATGGCCCTTTAGGG-3′) (SEQ ID NO: 340), MIG-5′ (5′-ATGACCCCAGTAGTGAGAAAGGGTC-3′) (SEQ ID NO: 341) and MIG-EcoRI-3′ (5′-GGAATTCTTATGTAGTCTTCTTTTGACGAGA-3′) (SEQ ID NO: 342) for SLC/CCL21 and MIG/CXCL9, respectively. Both reverse primers contain an EcoRI restriction site at their end to generate a 3′ overhang compatible with the 5′ end of the cleaved vector. The amplified DNAs were then digested with EcoRI, purified by electrophoresis on an agarose gel and the desired fragments were then cloned into the cleaved vector pMLV-MCS digested with NaeI and EcoRI restriction enzymes. The recombinant vectors thus obtained, pMLV-THAP1, pMLV-SLC/CCL21, pMLV-MIG/CXCL9, encode amino acids-2 to 213 of the THAP1 sequence or amino acids-24 to 134 of the maturated SLC/CCL21 sequence or amino acids-23 to 125 of the maturated MIG/CXCL9 sequence.

[1442] Transfection, virus harvest, and retroviral infection of cells: Retroviral vectors carrying either THAP1 or SLC/CCL21 or MIG and driven by the moloney murine leukemia virus LTR were produced by transient transfection in 293T cells (ATCC No. CRL11268, ATCC, Rockville, Md.) with the following plasmids: the packaging plasmid (pGAGPOL), the envelope plasmid coding for the vesicular stomatisis virus G protein (pVSV-G), and one of the transducing vector pMLV-THAP1, pMLV-SLC, pMLV-MIG, pMLV-MCS or pMLV-EGFP. 293T cells were transfected via the calcium phosphate precipitation method (Pear et al., 1993). Briefly, cells were plated at a density of 4×10⁶ cells per 75-cm² dishes one day prior to transfection. DNA-calcium phosphate complexes consisting of pVSVg, pGAGPOL and one of the transducing vector pMLV-THAP1, pMLV-SLC, pMLV-MIG, pMLV-MCS or pMLV-EGFP were diluted in an equal volume of HBS2×buffer and incubated with cells for 16 hours. After media removal, cells were replenished with fresh medium arid further incubated for 24 hours. Cell supernatants containing viral particles were harvested every 8-12 hours, clarified of cell debris using low-speed centrifugation and filtered on 0.45 μm filters.

[1443] Cell Transduction: A total of 10⁶ HUVEC were transduced in a 75 cm² plate with 10 ml of viral supernatant in the presence of 8 μg/ml of polybren (Sigma) as previously described (Yu. H. et al., Gene Therapy, 6, 1876-1883, 1999). After 4 hours, the supernatant was replaced by fresh endothelial cell medium consisting of MCDB131 (Gibco Brl) supplemented with 20% heat-inactivated serum, endothelial cell growth factor (ECGS, Sigma Chemical Co.) and 5 U/ml sodium heparin. When applicable, second transduction were processed using the same protocol a day after the first transduction. Forty-eight hours after the second infection, cells were trypsinized and pelleted for RNA preparation. Total RNA was isolated from 10⁶ cells with the Absolutely RNA miniprep kit according to the manufacturer's instructions (Stratagene, La Jolla, Calif., USA).

### Example 44

### Identification of THAP1 Target Genes by DNA Microarrays and Real-time Polymerase Chain Reaction (PCR)

[1444] To better understand the function of THAP1 as a nuclear factor in vasculature, we globally profiled THAP1 target genes either in primary human endothelial cells or in primary endothelial cells constitutively expressing chemokines in the nucleus using retroviral gene transfer and Agilent oligonucleotide-based microarray technology. We quantitated the THAP1 mediated changes in expression of more than 17,000 mRNAs by transducing human vascular endothelial cells with the following set of viral particles: MCS as the negative infection control, THAP1, SLC/CCL21 and MIG/CXCL9. In addition, SLC/CCL21 and MIG/CXCL9 infected endothelial cells were re-infected a day after with viral particles containing either MCS or THAP1. After 50 and 120 hours of the second infection, HUVECs cells were pelleted, washed and lysed to prepare total RNA and protein extracts. Over-expression of THAP1, SLC/CCL21 and MIG/CXCL9 in HUVECs was verified both at RNA and protein levels with standard quantitative PCR and Western blotting procedures.

[1445] Oligonucleotide Array Expression Analysis

[1446] Total RNA quality control was performed by running 25-50 ng on an RNA 6000 Nano Assay (Agilent) using a Bio-analyser 2100. For labelling, 500 ng of good quality total RNA was reverse-transcribed with an oligo-dT-T7 and double stranded cDNA was generated with the superscript double stranded cDNA synthesis kit (Invitrogen). In an in vitro transcription step with T7 RNA polymerase, the cDNA was linearly amplified and labeled with fluorescent nucleotides (low RNA input fluorescent linear amplification kit, Agilent). Ten micrograms of labeled and fragmented cRNA was then hybridized onto a Human genome IA expression array (G4110A, Agilent) for 16 hours at 45° C. Post-hybridization staining and washing were performed according to manufacturer instructions. Finally, chips were scanned with an Agilent DNA microarray scanner at the Microarray Facility. Data acquisition and analysis were performed with the Agilent Feature Extraction and Analysis software using the Rosetta Resolver data analysis system.

[1447] Real-Time Polymerase Chain Reaction (PCR)

[1448] Real-Time PCR was performed on cDNA synthesized from RNA isolated from HUVEC cells infected with THAP1, MCS, SLC, MIG, SLC and MCS, SLC and THAP1, MIG and MCS or MIG and THAP1 retroviral constructs using the ABI7700 Prism SDS Real-Time PCR Detection System (Applied Biosystems). The ABI7700 Prism was formatted for 96 well plates containing 25 μl PCR reactions. Real-time PCR were made such as each 25 μl contained 2 μl DNA-template (dilution 1:4), 12.5 μl SYBR Green PCR Master Mix kit (Applied Biosystems, Foster City, Calif., USA) and 0.8 μM forward and reverse gene primers. PCR conditions consisted of an initial denaturing step for 10 minutes at 95° C., followed by 40 cycles of a 2-segment step consisting of denaturation for 30 seconds at 95° C., annealing and elongation for 60 seconds at 60° C. After real time analysis, a melting curve was established for all samples to insure specific amplification. A negative control, where no template DNA was used, was run on each plate as well as a comparison of GAPDH between all samples. GAPDH served to equilibrate the starting material between the two experimental conditions. All unknown samples as well as controls were run in duplicate on the same plate (except for the negative control). Reactions were recorded and analysed with the ABI7700 Prism SDS sequence detection system. The threshold cycle (Cₜ) for each sample run in duplicate were determined and fold differences was performed as detailed previously (Van Trappen et al., 2001).

### Example 45

### THAP1 Regulates Cell Cycle Specific Genes and Modulates Proliferation of Both Primary Endothelial Cells and Immortalized Cancer Cells

[1449] We combined data from independent microarray analyses of the effects of THAP1 on gene expression in primary human endothelial cells to identify THAP1-target genes (THAP responsive genes).

[1450] Table 2A lists certain genes regulated by THAP1, as revealed by two independent microarray experiments with human primary endothelial cells transduced with THAP1 (THAP) or control (MCS) retrovirus expression vectors. The GenBank and Swiss Prot accession numbers are indicated for each gene as well as the fold changes, p-values and signal intensities obtained in the two microarray experiments.

[1451] Table 2B lists database accession numbers for each gene and corresponding polypeptide listed in Table 2A. Table 2B also shows the Aligent oligonucleotide which corresponds to each gene listed in Table 2A.

TABLE 2A

| Sequence | | | QUERY_Fold Change | QUERY_{—} | QUERY_{—} | QUERY_{—} | TARGET_Fold Change | TARGET_{—} | TARGET_{—} | TARGET_{—} |
|---|---|---|---|---|---|---|---|---|---|---|
| Name(s) | Sequence Description | SwissProt | Fold change 1st | P-value | Intensity1 | Intensity2 | Fold change 2nd | P-value | Intensity 1 | Intensity 2 |
| Name | Description | Acc Number | expt THAPvs MCS 50 h | pvalue | Intensity 1 | Intensity2 | expt THAPvs MCS 50 h | pvalue | Intensity1 | Intensity2 |
| USP16 | Ubiquitin specific protease 16, | Q9Y5T5 | −3.37 | 0 | 2445.9 | 725.44 | −1.66 | 6.49E−10 | 1224.1 | 739.65 |
| | deubiquitinates histone H2A and H2B, may | | | | | | | | | |
| | play a role in deubiquitination of proteins | | | | | | | | | |
| | involved in the condensation of mitotic | | | | | | | | | |
| | chromosomes and may deubiquitinate | | | | | | | | | |
| | histone H2A during apoptosis | | | | | | | | | |
| CDCA7 | Protein of unknown function | AAH27966.1 | −2.55 | 3.20E−14 | 1623.4 | 649.45 | −1.6 | 1.53E−07 | 2114.2 | 1321.11 |
| CKS1 | CDC28 protein kinase 1, binds and | P33551 | −2.19 | 0 | 28194 | 12832 | −2.01 | 2.20E−24 | 27653 | 13620.69 |
| | regulates CDK2-cyclin A complexes, | | | | | | | | | |
| | similar to S. pombe p13suc1, required for | | | | | | | | | |
| | SCF dependent degradation of p27 | | | | | | | | | |
| THAP1 | THAP domain protein 1 | BAA91635.1 | −2.13 | 1.10E−06 | 1018 | 471.4 | −1.92 | 5.96E−17 | 1510.6 | 791.48 |
| MAD2L1 | Mitotic arrest deficient 2 yeast homolog- | Q13257 | −1.91 | 1.46E−16 | 3934.9 | 2055.1 | −1.69 | 1.36E−05 | 3694.8 | 2191.56 |
| | like 1, essential for timing of anaphase | | | | | | | | | |
| | onset, involved in detection of kinetochore | | | | | | | | | |
| | attachment as part of the mitotic spindle | | | | | | | | | |
| | checkpoint; genetic variants may be linked | | | | | | | | | |
| | to breast cancer | | | | | | | | | |
| KIAA0008 | Member of the guanylate-kinase-associated | Q15398 | −1.9 | 0 | 6136.3 | 3232.8 | −1.54 | 1.36E−24 | 5911.6 | 3848.34 |
| | protein (GKAP) protein family | | | | | | | | | |
| PTTG1 | Pituitary tumor-transforming 1 (securin), a | CAA11683.1 | −1.63 | 5.37E−13 | 27920 | 17156 | −1.53 | 3.65E−17 | 20405 | 13308.98 |
| | transcriptional activator that promotes cell | | | | | | | | | |
| | proliferation and angiogenesis, involved in | | | | | | | | | |
| | sister chromatin separation and euploidy | | | | | | | | | |
| | maintenance; overexpression promotes | | | | | | | | | |
| | cellular transformation and tumorigenesis | | | | | | | | | |
| BIRC5 | Survivin, a member of the inhibitor of | O15392 | −1.62 | 4.30E−15 | 24865 | 15286 | −1.55 | 2.90E−08 | 17927 | 11605.75 |
| | apoptosis protein family that is involved in | | | | | | | | | |
| | G2-M transition and exit of the mitotic cell | | | | | | | | | |
| | cycle; may play a role in oncogenesis | | | | | | | | | |
| PTTG3 | Pituitary tumor-transforming 3, a protein | AAC64411.1 | −1.62 | 4.56E−05 | 26737 | 16489 | −1.54 | 2.41E−24 | 20058 | 13058.54 |
| | that may be associated with tumorigenesis | | | | | | | | | |
| HMMR | Hyaluronan mediated motility receptor, | O75330 | −1.6 | 1.08E−05 | 3584.9 | 2231.3 | −1.69 | 9.91E−06 | 2255.3 | 1286.07 |
| | binds hyaluronan and is important for cell | | | | | | | | | |
| | motility, binds microtubules and | | | | | | | | | |
| | microfilaments intracellularly, may also be | | | | | | | | | |
| | involved in cell proliferation; gene | | | | | | | | | |
| | mutations may contribute to colon cancer | | | | | | | | | |
| | development | | | | | | | | | |
| PTTG2 | Pituitary tumor transforming gene 2, | AAC64410.1 | −1.52 | 4.44E−06 | 4283.3 | 2653.2 | −1.56 | 8.44E−07 | 4727.5 | 3064.92 |
| | protein with strong similarity to human | | | | | | | | | |
| | PTTG1, which is a proto-oncoprotein with | | | | | | | | | |
| | PXXP motifs that may bind to SH3 | | | | | | | | | |
| | domains, suggesting roles in intracellular | | | | | | | | | |
| | signal transduction and tumor-specific | | | | | | | | | |
| | pathogenesis | | | | | | | | | |

[1452] TABLE 2B
Part 1

| | | | | | | | | | |
|---|---|---|---|---|---|---|---|---|---|
| Gene | | | Locus | | | Genomic | | | |
| Name | Agilent | Protein | Id | Symbol | RefSeq | hit | Unigene | GenBank | Alias |

| | | | | | | | | | |
|---|---|---|---|---|---|---|---|---|---|
| USP16 | =I_962079 | SP:Q9Y5T5 | 10600 | USP16 | NM_006447 | NT_011512 | Hs.99819 | AF126736 m; | Ubp-M |
| | | | | | | | | AK023247 m; | |
| | | | | | | | | AK025104 m; | |
| | | | | | | | | none p | |
| CDCA7 | =I_928296 | GP:AAH27966.1 | 83879 | CDCA7 | NM_031942; | NT_005403 | Hs.333893 | AK027628 m; | JPO1;FLJ14722; |
| | | | | | NM_145810 | | | AK027642 m; | FLJ14736; |
| | | | | | | | | AK075134 m; | MGC34109 |
| | | | | | | | | AL833728 m; | |
| | | | | | | | | AL834186 m; | |
| | | | | | | | | AY029179 m; | |
| | | | | | | | | BC015124 m; | |
| | | | | | | | | BC027966 m | |
| CKS1 | =I_929087 | SP:P33551 | 1163 | CKS1B | NM_001826 | NT_004668 | Hs.348669 | AF279897 m; | CKS1;ckshs1 |
| | | | | | | | | BC007751 m; | |
| | | | | | | | | BC015629 m; | |
| | | | | | | | | X54941 m; | |
| | | | | | | | | none p | |
| THAP1 | =I_929644 | GP:BAA91635.1 | 55145 | THAP1 | NM_018105 | NT_008251 | Hs.7432 | AK001339 m; | THAP1 |
| | | | | | | | | BC021721 m | |
| MAD2L1 | =I_957747 | SP:Q13257 | 4085 | MAD2L1 | NM_002358 | NT_016354 | Hs.79078 | AJ000186 m; | MAD2;HSMAD2 |
| | | | | | | | | BC000356 m; | |
| | | | | | | | | BC005945 m; | |
| | | | | | | | | U31278 m; | |
| | | | | | | | | none p | |
| KIAA0008 | =I_959284 | SP:Q15398 | 9787 | DLG7 | NM_014750 | NT_026437 | Hs.77695 | AB076695 m; | DLG1;HURP; |
| | | | | | | | | BC010658 m; | KIAA0008 |
| | | | | | | | | BC016276 m; | |
| | | | | | | | | D13633 m; | |
| | | | | | | | | none p | |
| PTTG1 | =I_958208 | GP:CAA11683.1 | 9232 | PTTG1 | NM_004219 | NT_023133 | Hs.252587 | AF167560 g; | EAP1;PTTG;HPTTG; |
| | | | | | | | | AF167564 g; | TUTR1;SECURIN |
| | | | | | | | | AF062649 m; | |
| | | | | | | | | AF075242 m; | |
| | | | | | | | | AF095287 m; | |
| | | | | | | | | AJ223953 m; | |
| | | | | | | | | BC026003 m | |
| BIRC5 | =I_960986 | SP:015392 | 332 | BIRC5 | NM_001168 | NT_010641 | Hs.1578 | U75285 g; | API4;EPR-1; |
| | | | | | | | | AB028869 m; | SURVIVIN |
| | | | | | | | | AF077350 m; | |
| | | | | | | | | BC000784 m; | |
| | | | | | | | | BC008718 m; | |
| | | | | | | | | none p | |
| PTTG3 | =I_929699 | GP:AAC64411.1 | 26255 | PTTG3 | NM_021000 | NT_008183 | Hs.350968 | AF200720 g; | — |
| | | | | | | | | AF095289 m | |
| HMMR | =I_957819 | SP:075330 | 3161 | HMMR | NM_012484; | NT_023133 | Hs.72550 | AF032862 m; | RHAMM |
| | | | | | NM_012485 | | | U29343 m; | |
| | | | | | | | | none p; | |
| | | | | | | | | D17297 u | |
| PTTG2 | =I_957769 | GP:AAC4410.1 | 10744 | PTTG2 | NM_006607 | NT_016297 | Hs.350966 | AF116538 g; | — |
| | | | | | | | | AF200719 g; | |
| | | | | | | | | AF095288 m | |

Part 2

| | | | | | |
|---|---|---|---|---|---|
| Gene Name | Description | Omim | Location | Pfam | Ontologie |

| | | | | | | | |
|---|---|---|---|---|---|---|---|
| USP16 | =ubiquitin | 604735 | 21q22.11 | Ubiquitin C- | COG5560 | molecular | GO:0004843; |
| | specific | | | terminal hydrolase | | function\|ubiquitin- | GO:0004197; |
| | protease 16 | | | [Posttranslational | | specific protease | GO:0007049; |
| | | | | modification, | | activity;molecular | GO:0006511; |
| | | | | protein turnover, | | function\|cysteine- | GO:0005737; |
| | | | | chaperones] | | type endopeptidase | GO:0004221; |
| | | | | | | activity;biological | GO:0016787 |
| | | | | | | process\|cell | |
| | | | | | | cycle;biological | |
| | | | | | | process\|ubiquitin- | |
| | | | | | | dependent protein | |
| | | | | | | catabolism;cellular | |
| | | | | | | component\|cytoplasm; | |
| | | | | | | molecular | |
| | | | | | | function\|ubiquitin | |
| | | | | | | C-terminal hydrolase | |
| | | | | | | activity;molecular | |
| | | | | | | function\|hydrolase | |
| | | | | | | activity | |
| CDCA7 | =cell division | 606916 | 2q31 | — | — | — | — |
| | cycle | | | | | | |
| | associated 7 | | | | | | |
| CKS1 | =CDC28 protein | 116900 | 1q21.2 | Cyclin-dependent | pfam01111 | molecular | GO:0004693; |
| | kinase | | | kinase regulatory | | function\|cyclin- | GO:0000079; |
| | regulatory | | | subunit | | dependent protein | GO:0000910 |
| | subunit 1B | | | | | kinase | |
| | | | | | | activity;biological | |
| | | | | | | process\|regulation | |
| | | | | | | of CDK | |
| | | | | | | activity;biological | |
| | | | | | | process\|cytokinesis | |
| THAP1 | =THAP1 | 605295 | 8p11.21 | THAP domain | pfam05485 | molecular | GO:0003677 |
| | | | | | | function\|DNA binding | |
| MAD2L1 | =MAD2 mitotic | 601467 | 4q27 | HORMA domain. The | pfam02301 | biological | GO:0007093; |
| | arrest | | | HORMA (for Hoplp, | | process\|mitotic | GO:0007049; |
| | deficient-like | | | Rev7p and MAD2) | | checkpoint;biological | GO:0007067; |
| | 1 (yeast) | | | domain has been | | process\|cell | GO:0005699; |
| | | | | suggested to | | cycle;biological | GO:0005634 |
| | | | | recognise chromatin | | process\|mitosis; | |
| | | | | states that result | | cellular | |
| | | | | from DNA adducts, | | component\|kineto- | |
| | | | | double stranded | | chore;cellular | |
| | | | | breaks or non- | | component nucleus | |
| | | | | attachment to the | | | |
| | | | | spindle and acts as | | | |
| | | | | an adaptor that | | | |
| | | | | recruits other | | | |
| | | | | proteins. MAD2 is | | | |
| KIAA0008 | =discs, large | 605584 | 14q22.2 | Guanylate-kinase- | pfam03359 | molecular | GO:0005554; |
| | homolog 7 | | | associated protein | | function\|molecular_{—} | GO:0000004; |
| | (Drosophila) | | | (GKAP) protein | | function | GO:0007267; |
| | | | | | | unknown;biological | GO:0008372 |
| | | | | | | process\|biological_{—} | |
| | | | | | | process | |
| | | | | | | unknown;biological | |
| | | | | | | process\|cell-cell | |
| | | | | | | signaling;cellular | |
| | | | | | | component\|cellular_{—} | |
| | | | | | | component unknown | |
| PTTG1 | =pituitary | 604147 | 5q35.1 | — | — | molecular | GO:0003700; |
| | tumor- | | | | | function\|transcrip- | GO:0007283; |
| | transforming 1 | | | | | tion factor | GO:0007048; |
| | | | | | | activity;biological | GO:0006366; |
| | | | | | | process\|spermato- | GO:0005737; |
| | | | | | | genesis;biological | GO:0005634 |
| | | | | | | process\|oncogenesis; | |
| | | | | | | biological | |
| | | | | | | process\|transcrip- | |
| | | | | | | tion from Pol II | |
| | | | | | | promoter;cellular | |
| | | | | | | component\|cytoplasm; | |
| | | | | | | cellular | |
| | | | | | | component\|nucleus | |
| BIRC5 | =baculoviral | 603352 | 17q25 | Baculoviral | smart00238 | molecular | GO:0008189; |
| | IAP repeat- | | | inhibition of | | function\|apoptosis | GO:0000086; |
| | containing 5 | | | apoptosis protein | | inhibitor | GO:0006916; |
| | (survivin) | | | repeat | | activity;biological | GO:0007048; |
| | | | | | | process\|G2/M | GO:0005876 |
| | | | | | | transition of | |
| | | | | | | mitotic cell | |
| | | | | | | cycle;biological | |
| | | | | | | process\|anti- | |
| | | | | | | apoptosis;biological | |
| | | | | | | process\|oncogenesis; | |
| | | | | | | cellular | |
| | | | | | | component\|spindle | |
| | | | | | | microtubule | |
| PTTG3 | =pituitary | 605127 | 8q13.1 | — | — | — | — |
| | tumor- | | | | | | |
| | transforming 3 | | | | | | |
| HHMR | =hyaluronan- | 600936 | 5q33.2- | Chromosome | COG1196; | molecular | GO:0005540; |
| | mediated | | qter | segregation ATPases | COG1196 | function\|hyaluronic | GO:0006928 |
| | motility | | | [Cell division and | | acid | |
| | receptor | | | chromosome | | binding;biological | |
| | (RHAM) | | | partitioning]; | | process\|cell | |
| | | | | Chromosome segre- | | motility | |
| | | | | gation ATPases | | | |
| | | | | [Cell division and | | | |
| | | | | chromosome | | | |
| | | | | partitioning] | | | |
| PTTG2 | =pituitary | 604231 | 4p12 | — | — | — | — |
| | tumor | | | | | | |
| | transforming 2 | | | | | | |

Part 3

| | | | | |
|---|---|---|---|---|
| Gene Name | PubMed | GoldenPath hg16 (7/2003) | Goldenpath (oligos) | Acembly |

| | | | | |
|---|---|---|---|---|
| USP16 | =12477932;10830953;10077596; | chr21:29318881-29348681 + 21q21.3 | chr21:29348613- | — |
| | 9827704 | | 29348672 + | |
| CDCA7 | =11598121 | chr2:174422091-174436263 + 2q31.1 | chr2:174197514- | — |
| | | | 174197573 + | |
| CKS1 | =12473461;8697818;8601310; | chr1:152164005-152168514 + 1q22 | chr10:30137616- | — |
| | 2227411 | | 30137675 + | |
| THAP1 | =12477932 | chr8:42709181-42715836 − 8p11.21 | chr8:42432944- | — |
| | | | 42433003 − | |
| MAD2L1 | =12477932;12351790;11912137; | chr4:121439410-121446782 − 4q27 | chr4:121374550- | — |
| | 11907259;10366450;9615237; | | 121374609 − | |
| | 9546394; 9345911;8824189 | | | |
| KIAA0008 | =12527899;11543626;9179496; | chr14:53604888-53648437 − 14q22.3 | chr14:53605154- | DLG7.b |
| | 7584028;7584026 | | 53605213 − | |
| PTTG1 | =12727994;12590639;12444553; | chr5:159829759-159836640 + 5q33.3 | chr5:159791187- | — |
| | 12403781;12355087;12324572; | | 159791246 + | |
| | 12213878;12194817;10580151; | | | |
| | 10411507;10393434;10022450; | | | |
| | 9925941;9915854;9892021; | | | |
| | 9811450 | | | |
| BIRC5 | =12885482;12833149;12805209; | chr17:76807471-76817900 + 17q25.3 | chr17:76681795- | — |
| | 12794243;12773388;12709681; | | 76681854 + | |
| | 12654446;12643601;12609713; | | | |
| | 12569609;12556969;12517802; | | | |
| | 12510154;12419797;12393476; | | | |
| | 12388702;12374680;12363043; | | | |
| | 12235242;12174930;12168867; | | | |
| | 12143224;12133447;12119561; | | | |
| | 12115583;12085263;12073047; | | | |
| | 11925104;11888845;11877677; | | | |
| | 11875736;11861764;11844831; | | | |
| | 11821157;11773702;11728454; | | | |
| | 11712083;11084331;9859993; | | | |
| | 9556606;9256286;8106347; | | | |
| | 7947793 | | | |
| PTTG3 | =10806349 | chr8:67729592-67730201 − 8q13.2 | chr8:67402834- | — |
| | | | 67402893 − | |
| HMMR | =12712331;12225794;11716065; | chr5:162868557-162899840 + 5q34 | chr5:162854380- | — |
| | 9601098;8890751;8595891 | | 162854439 + | |
| PTTG2 | =10806349;10084610 | chr4:37859235-37859811 + 4p14 | chr4:37796987- | PTTG2 |
| | | | 37797046 + | |

Part 4

| | | |
|---|---|---|
| Gene Name | Oligo Agilent | SEQ ID NO: |

| | | |
|---|---|---|
| USP16 | =GTACTTTGTGTTTAATATATCTGGGTGATGGATCACAACACATCAATAAACTGACTTACC | 519 |
| CDCA7 | =ATTTACTTGCATATGTAAACCATTGCTGTGCCATTCAATGTTTGATGCATAATTGGACCT | 520 |
| CKS1 | =AGATGGAGGAAGCATCTGAGTTTGAGACCATGGCTGTTACAGGGATCATGTAAACTTGCT | 521 |
| THAP1 | =TGGAGATTTAAACACTGAGGTTTCTGTTCAAACTGTGAGTTCTGTTCTTTGTGAGAAATT | 522 |
| MAD2L1 | =TGTACCTGAAAAATGGGAAGAGTCGGGACCACAGTTTATTACCAATTCTGAGGAAGTCCG | 523 |
| KIAA0008 | =ATCCATTTACTCAGCTGGAGAGGAGACATCAAGAACATGCCAGACACATTTGTTTTGGTG | 524 |
| PTTG1 | =CTGGATGTTGAATTGCCACCTGTTTGCTGTGACATAGATATTTAAATTTCTTAGTGCTTC | 525 |
| BIRC5 | =CTGGAAACCTCTGGAGGTCATCTCGGCTGTTCCTGAGAAATAAAAAGCCTGTCATTTGAA | 526 |
| PTTG3 | =TGTTGCAGTCTCCTTTAAGCATTCTGTTGACCCTGGATGTTGAATTGCCACCTGTTTGCT | 527 |
| HMMR | =ACTATTTCTTCAGAGTTTGTCATATACTGCTTGTCATCTGCATGTCTACTCAGCATTTGA | 528 |
| PTTG2 | =AGACTGTTAAAACAAAAAGTTCTGTTCCTGCCTCAGATGACGCCTATCCAGAAATAGAAA | 529 |

[1453] Out of 17000 genes examined in these microarray experiments, we identified 23 candidate THAP1-target genes that are downregulated in THAP1-overexpressing cells. One of the genes identified corresponds to THAP1 itself (FLJ10477), suggesting auto-regulation. Nine genes correspond to predicted proteins with unknown functions. Strikingly, at least 10 of the remaining 13 genes downregulated by THAP1 (see Table 2A) correspond to proteins previously linked to cell cycle/cell proliferation (CKS1, Survivin, PTTG1/Securin, PTTG2/Securin2, PTTG3/Securin3, MAD2L1, USP16, HMMR, KIAA0008, CDCA7). Many of these genes share common characteristics.

[1454] 1) role in mitosis/chromosome segregation: Survivin (polypeptide sequence SEQ ID NO: 343, nucleotide sequence SEQ ID NO: 344) (Li et al. (1998) Nature 396:580-584; Li et al. (1999) Nature Cell Biol 1:461-466; Lens et al. (2003) EMBO J 22:2934-2947), PTTG1/Securin (polypeptide sequence SEQ ID NO: 345, nucleotide sequence SEQ ID NO: 346) (Zou et al. (1999) Science 285:418-422; Wang et al. (2001) Mol Endocrinol 15:1870-1879), CKS1 (polypeptide sequence SEQ ID NO: 347, nucleotide sequence SEQ ID NO: 348) (Pines (1996) Curr Biol 6:1399-1402; Hixon et al. (2000) J Biol Chem 275:40434-40442), MAD2L1 (polypeptide sequence SEQ ID NO: 349, nucleotide sequence SEQ ID NO: 350) (Dobles et al. (2000) Cell 101:635-645; Michel et al. (2001) Nature 409:355-359), USP16/Ubp-M (polypeptide sequence SEQ ID NO: 351, nucleotide sequence SEQ ID NO: 352) (Cai et al. (1999) PNAS 96:2828-2833), HMMR/RHAMM (polypeptide sequence of isoform A, SEQ ID NO: 353, nucleotide sequence of transcript variant 1, SEQ ID NO: 354) (polypeptide sequence (gi/7108351) SEQ ID NO: 365, nucleotide sequence of transcript variant 2, SEQ ID NO: 366) ( (Maxwell et al. (2003) Mol Biol Cell 14:2262-2276; Tolg et al. (2003) Oncogene 22:6873-6882), KIAA0008/HURP (polypeptide sequence SEQ ID NO: 355, nucleotide sequence SEQ ID NO: 356) (Tsou et al. (2003) Oncogene 22:298-307);

[1455] 2) specific mRNA expression in S/G2-M: CKS1 (Richardson et al. (1990) Genes Dev 4:1332-1344), Survivin (Li et al. (1998) Nature 396:580-584), PTTG1/Securin (Zou et al. (1999) Science 285:418-422; Yu et al. (2000) Mol Endocrinol 14:1137-1146), KIAA0008/HURP (Bassal et al. (2001) Genomics 77:5-7; Tsou et al. (2003) Oncogene 22:298-307);

[1456] 3) upregulation in human tumors: CKS1 (Inui et al. (2003) BBRC 303:978-984), Survivin (Ambrosini et al. (1997) Nature Med 3:917-921), PTTG1/Securin (Heaney et al. (2000) Lancet 355:716-719; Zou et al. (1999) Science 285:418-422), PTTG2/Securin2 (polypeptide sequence SEQ ID NO: 357, nucleotide sequence SEQ ID NO: 358) (Chen et al. (2000) Gene 248:41-50), PTTG3/Securin3 (polypeptide sequence SEQ ID NO: 359, nucleotide sequence SEQ ID NO: 360) (Chen et al. (2000) Gene 248:41-50), HMMR/RHAMM (Tolg et al. (2003) Oncogene 22:6873-6882), KIAA0008/HURP (Bassal et al. (2001) Genomics 77:5-7; Tsou et al. (2003) Oncogene 22:298-307), CDCA7/JPO1 (polypeptide sequence of variant 1, SEQ ID NO: 361, nucleotide sequence of variant 1, SEQ ID NO: 362; polypeptide sequence of isoform 2, SEQ ID NO: 363, nucleotide sequence of transcript variant 2, SEQ ID NO: 364) (Prescott et al. (2001) J Biol Chem 276:48276-48284);

[1457] 4) negative regulation by the p53 tumor suppressor: Survivin (Hoffman et al. (2002) J Biol Chem 277:3247-3257; Mirza et al. (2002) Oncogene 21:2613-2622), PTTG1/Securin (Zhou et al. (2003) J Biol Chem 278:462-470);

[1458] 5) stimulation of angiogenesis: Survivin (O° Connor et al. (2000) Am J Path 156:393-398; Papapetropoulos et al. (2000) J Biol Chem 275:9102-9105; Mesri et al. (2001) Am J Path 158:1757-1765), PTTG1/Securin (Ishikawa et al. (2001) J Clin Endocrinol Metab 86:867-874; McCabe et al. (2002) J Clin Endocrinol Metab 87:4238-4244).

[1459] In addition, survivin has been shown to be a critical anti-apoptotic factor at the interface between cell cycle/mitosis and apoptosis (Li et al. (1998) Nature 396:580-584; Li et al. (1999) Nature Cell Biol 1:461-466), which plays an important role in the control of endothelial cell apoptosis (O'Connor et al. (2000) Am J Path 156:393-398; Papapetropoulos et al. (2000) J Biol Chem 275:9102-9105; Mesri et al. (2001) Am J Path 158:1757-1765). Downregulation of survivin expression by THAP1 may therefore contribute to its pro-apoptotic activity (see Example 10). Simultaneous downregulation by THAP1 of all these genes critical for cell cycle/cell proliferation and/or apoptosis (CKS1, Survivin, PTTG1/Securin, MAD2L1, USP16, HMMR), is expected to result in cell cycle block and inhibition of cell proliferation. Accordingly, we found that overexpression of THAP1 in primary human endothelial cells or human U2OS osteosarcoma cancer cells resulted in inhibition of cell proliferation after a few days, followed by apoptosis.

### Example 46

### THAP1 Responsive Elements in Cell Cycle-specific THAP1 Target Genes

[1460] We searched the promoters of the THAP1-target genes for the presence of THAP1-responsive elements. This analysis allowed us to identify candidate DR-5 or THRE motifs that may mediate direct binding of THAP1 to the promoters of its target genes. A candidate DR5-type THAP1 responsive element (GGGCAAnnnnnGGGCAC) (SEQ ID NO: 316) located in the antisense orientation close to the AUG codon of the human survivin/BIRC5 gene is shown in FIG. 30. A candidate THRE-type THAP1 responsive element (AGTGTGGGCAT) (SEQ ID NO: 318) located in the antisense orientation near the TATA box of the Ubiquitin specific protease 16 gene is shown in FIG. 31.

### Example 47

### Chemokine SLC/CCL21 Modulates Transcription of Cell-cycle Specific Genes in a THAP1-dependent Manner

[1461] To examine the effects of the nuclear SLC/THAP1 complex on global expression profiles in human primary endothelial cells (HUVEC), we performed microarray experiments with cells successively transduced with SLC/CCL21 chemokine and THAP1 (SLC/THAP) retrovirus expression vectors or control cells transduced with MCS/THAP1 or SLC/MCS retrovirus expression vectors. A hierarchical cluster analysis was performed based on similarity of expression patterns of genes.

[1462] Table 3A lists the genes downregulated by the SLC/THAP1 complex in human primary endothelial cells, as revealed by the above-describe microarray experiments. For each gene, the fold changes, p values and signal intensities obtained in the three microarray experiments are indicated.

[1463] Table 3B lists database accession numbers and SEQ ID NOs. for each gene and corresponding polypeptide listed in Table 3A.

TABLE 3A

| | Experiment Name | MCS/THAPvsMCS | | | | SLC/THAPvsMCS | | | | SLC/MCSvsMCS | | | |
|---|---|---|---|---|---|---|---|---|---|---|---|---|---|
| Sequence | | | | | | | | | | | | | |
| Name(s) | Sequence Description | Fold Change | P-Value | Intensity 1 | Intensity 2 | Fold Change | P-Value | Intensity 1 | Intensity 2 | Fold Change | P-Value | Intensity 1 | Intensity 2 |
| CKS1 | CDC28 protein kinase 1, binds | −2.01 | 2.20E−24 | 27653 | 13620.7 | −2.4 | 0 | 23175.76 | 9619.37 | −1.22 | 8.53E−04 | 23654.3 | 19415.75 |
| | and regulates CDK2-cyclin A | | | | | | | | | | | | |
| | complexes, similar to S. pombe | | | | | | | | | | | | |
| | p13suc1, required for SCF | | | | | | | | | | | | |
| | dependent degradation of p27 | | | | | | | | | | | | |
| PTTG2 | Pituitary tumor transforming | −1.56 | 8.44E−07 | 4727.5 | 3064.92 | −2.25 | 2.65E−10 | 4390.91 | 1952.05 | −1.22 | 0.06 | 3336.21 | 2799.64 |
| | gene 2, protein with strong | | | | | | | | | | | | |
| | similarity to human PTTG1, | | | | | | | | | | | | |
| | which is a proto-oncoprotein | | | | | | | | | | | | |
| | with PXXP motifs that may bind | | | | | | | | | | | | |
| | to SH3 domains, suggesting | | | | | | | | | | | | |
| | roles in intracellular signal | | | | | | | | | | | | |
| | transduction and tumor-specific | | | | | | | | | | | | |
| | pathogenesis | | | | | | | | | | | | |
| CDKN3 | Cyclin-dependent kinase | −1.53 | 2.08E−14 | 4984.3 | 3267.56 | −2.05 | 9.79E−16 | 4124.82 | 1998.74 | −1.24 | 2.19E−05 | 4168.48 | 3367.27 |
| | inhibitor 3 (cyclin-dependent | | | | | | | | | | | | |
| | kinase interactor 1), a tyrosine- | | | | | | | | | | | | |
| | serine phosphatase that interacts | | | | | | | | | | | | |
| | with cyclin-dependent kinases | | | | | | | | | | | | |
| | and inhibits progression through | | | | | | | | | | | | |
| | the cell cycle, dephosphorylates | | | | | | | | | | | | |
| | CDK2 monomer on Thr160 | | | | | | | | | | | | |
| BUB1 | Budding uninhibited by | −1.38 | 1.44E−04 | 1623.9 | 1195.58 | −2.05 | 2.71E−08 | 1528.46 | 746.68 | −1.07 | 0.41 | 1162.03 | 1087.69 |
| | benzimidazoles 1 homolog, a | | | | | | | | | | | | |
| | spindle assembly checkpoint | | | | | | | | | | | | |
| | protein that may sense | | | | | | | | | | | | |
| | kinetochore tension; mutations | | | | | | | | | | | | |
| | are associated with lung cancer, | | | | | | | | | | | | |
| | adult T cell leukemia, and | | | | | | | | | | | | |
| | chromosome instability in | | | | | | | | | | | | |
| | colorectal cancer cell lines | | | | | | | | | | | | |
| HMMR | Hyaluronan mediated motility | −1.69 | 9.91E−06 | 2255.3 | 1286.07 | −1.94 | 1.76E−15 | 1987.08 | 1019.59 | −1.25 | 0.02 | 1779.65 | 1405.32 |
| | receptor, binds hyaluronan and is | | | | | | | | | | | | |
| | important for cell motility, binds | | | | | | | | | | | | |
| | microtubules and microfilaments | | | | | | | | | | | | |
| | intracellularly, may also be | | | | | | | | | | | | |
| | involved in cell proliferation; | | | | | | | | | | | | |
| | gene mutations may contribute | | | | | | | | | | | | |
| | to colon cancer development | | | | | | | | | | | | |
| U1SNRNPBP | U1-snRNP binding protein | −1.92 | 4.00E−05 | 904.14 | 461.82 | −1.9 | 5.93E−08 | 799.93 | 417.53 | −1.17 | 0.1 | 852.82 | 729.99 |
| | homolog (70 kD), arginine rich | | | | | | | | | | | | |
| | basic protein similar to U1 70K | | | | | | | | | | | | |
| | splicing factor (SNRP70); two | | | | | | | | | | | | |
| | alternative forms identified | | | | | | | | | | | | |
| | which differ in the 5 untranslated | | | | | | | | | | | | |
| | region | | | | | | | | | | | | |
| H1F5 | H1 histone family member 5, a | −1.39 | 0.15 | 445.51 | 314.07 | −1.89 | 1.87E−04 | 411.96 | 216.91 | −1.14 | 0.51 | 310.27 | 269.82 |
| | linker histone involved in | | | | | | | | | | | | |
| | compaction of nucleosomes into | | | | | | | | | | | | |
| | high-order chromatin structures | | | | | | | | | | | | |
| PTTG3 | Pituitary tumor-transforming 3, a | −1.54 | 2.41E−24 | 20058 | 13058.5 | −1.89 | 2.23E−21 | 17289.26 | 9167.28 | −1.16 | 7.79E−04 | 14947.8 | 12937.42 |
| | protein that may be associated | | | | | | | | | | | | |
| | with tumorigenesis | | | | | | | | | | | | |
| TOPK | PDZ-binding kinase, a serine- | −1.43 | 1.43E−06 | 3873.8 | 2735.7 | −1.88 | 3.71E−19 | 3428.27 | 1822.17 | −1.13 | 0.08 | 3004.03 | 2669.67 |
| | threonine kinase active during | | | | | | | | | | | | |
| | mitosis which binds PDZ | | | | | | | | | | | | |
| | domain-containing proteins, also | | | | | | | | | | | | |
| | activates p38 MAP kinase, may | | | | | | | | | | | | |
| | be involved in cell cycle | | | | | | | | | | | | |
| | regulation, lymphoid cell | | | | | | | | | | | | |
| | activation, and spermatogenesis | | | | | | | | | | | | |
| PTTG1 | Pituitary tumor-transforming 1 | −1.53 | 3.65E−17 | 20405 | 13309 | −1.87 | 3.45E−30 | 19057.67 | 10181.17 | −1.19 | 1.96E−03 | 16411.9 | 13758.9 |
| | (securin), a transcriptional | | | | | | | | | | | | |
| | activator that promotes cell | | | | | | | | | | | | |
| | proliferation and angiogenesis, | | | | | | | | | | | | |
| | involved in sister chromatin | | | | | | | | | | | | |
| | separation and euploidy | | | | | | | | | | | | |
| | maintenance; overexpression | | | | | | | | | | | | |
| | promotes cellular transformation | | | | | | | | | | | | |
| | and tumorigenesis | | | | | | | | | | | | |
| H1F3 | H1 histone family member 3, | −1.28 | 2.85E−03 | 491.79 | 382.35 | −1.83 | 9.37E−04 | 541.92 | 290.18 | −1.27 | 0.05 | 430.9 | 339.32 |
| | involved in compaction of DNA | | | | | | | | | | | | |
| | into nucleosomes and into high- | | | | | | | | | | | | |
| | order chromatin structures | | | | | | | | | | | | |
| KIAA0008 | Member of the guanylate-kinase- | −1.54 | 1.36E−24 | 5911.6 | 3848.34 | −1.81 | 1.81E−36 | 5327.3 | 2939.49 | −1.14 | 0.01 | 4841.06 | 4268.61 |
| | associated protein (GKAP) | | | | | | | | | | | | |
| | protein family | | | | | | | | | | | | |
| CDCA7 | c-myc target JPO1 | −1.6 | 1.53E−07 | 2114.2 | 1321.11 | −1.8 | 2.12E−06 | 1704.58 | 946.32 | −1.28 | 3.85E−03 | 1839.09 | 1440.39 |
| BIRC5 | Survivin, a member of the | −1.55 | 2.90E−08 | 17927 | 11605.8 | −1.79 | 2.66E−13 | 18270.21 | 10211.76 | −1.11 | 0.18 | 13028 | 11869.49 |
| | inhibitor of apoptosis protein | | | | | | | | | | | | |
| | family that is involved in G2-M | | | | | | | | | | | | |
| | transition and exit of the mitotic | | | | | | | | | | | | |
| | cell cycle; may play a role in | | | | | | | | | | | | |
| | oncogenesis | | | | | | | | | | | | |
| CNAP1 | Protein with low similarity to | −1.39 | 6.85E−03 | 1441.4 | 1022.72 | −1.78 | 9.22E−29 | 1332.49 | 747.25 | −1.16 | 0.17 | 1216.94 | 1056.96 |
| | yeast LOC7, which is required | | | | | | | | | | | | |
| | for sister chromatid separation | | | | | | | | | | | | |
| | and segregation; a component of | | | | | | | | | | | | |
| | the condensin complex which | | | | | | | | | | | | |
| | includes CAP-E and CAP-C | | | | | | | | | | | | |
| | (1053947) | | | | | | | | | | | | |
| FLJ10477 | THAP1 | −1.92 | 5.96E−17 | 1510.6 | 791.48 | −1.75 | 6.02E−08 | 1321.01 | 757.89 | −1.05 | 0.64 | 1202.49 | 1150.59 |
| USP16 | Ubiquitin specific protease 16, | −1.66 | 6.49E−10 | 1224.1 | 739.65 | −1.75 | 1.49E−19 | 1722.79 | 979.19 | −1.23 | 0.19 | 896.55 | 742.12 |
| | deubiquitinates histone H2A and | | | | | | | | | | | | |
| | H2B, may play a role in | | | | | | | | | | | | |
| | deubiquitination of proteins | | | | | | | | | | | | |
| | involved in the condensation of | | | | | | | | | | | | |
| | mitotic chromosomes and may | | | | | | | | | | | | |
| | deubiquitinate histone H2A | | | | | | | | | | | | |
| | during apoptosis | | | | | | | | | | | | |
| MAD2L1 | Mitotic arrest deficient 2 yeast | −1.69 | 1.36E−05 | 3694.8 | 2191.56 | −1.75 | 3.68E−06 | 3934.21 | 2248.14 | −1.34 | 0.01 | 3316.32 | 2479.62 |
| | homolog-like 1, essential for | | | | | | | | | | | | |
| | timing of anaphase onset, | | | | | | | | | | | | |
| | involved in detection of | | | | | | | | | | | | |
| | kinetochore attachment as part | | | | | | | | | | | | |
| | of the mitotic spindle | | | | | | | | | | | | |
| | checkpoint; genetic variants may | | | | | | | | | | | | |
| | be linked to breast cancer | | | | | | | | | | | | |
| CDCA1 | Member of the Nuf2 family, | −1.42 | 1.07E−15 | 1735.6 | 1219.5 | −1.74 | 2.42E−21 | 1247.39 | 713.27 | −1.13 | 3.04E−03 | 1214.81 | 1071.52 |
| | which are components of mitotic | | | | | | | | | | | | |
| | spindles | | | | | | | | | | | | |
| BUB1B | BUB1 budding uninhibited by | −1.21 | 5.65E−03 | 1327.8 | 1102.95 | −1.74 | 1.07E−16 | 1177.27 | 675.06 | −1.01 | 0.88 | 1105.39 | 1084.43 |
| | benzimidazoles 1 homolog beta, | | | | | | | | | | | | |
| | a protein kinase that acts in the | | | | | | | | | | | | |
| | mitotic spindle checkpoint and | | | | | | | | | | | | |
| | inhibits anaphase-promoting | | | | | | | | | | | | |
| | complex activation; genetic | | | | | | | | | | | | |
| | mutations/inactivation is | | | | | | | | | | | | |
| | associated with leukemia and | | | | | | | | | | | | |
| | colorectal cancers | | | | | | | | | | | | |
| DUT | dUTP pyrophosphatase, | −1.33 | 1.25E−04 | 9787.6 | 7429.53 | −1.72 | 4.41E−08 | 8255.49 | 4778.82 | −1.18 | 0.06 | 7430.5 | 6384.26 |
| | maintains dUTP at low levels to | | | | | | | | | | | | |
| | prevent misincorporation into | | | | | | | | | | | | |
| | DNA during replication, | | | | | | | | | | | | |
| | mediates resistance to 5- | | | | | | | | | | | | |
| | fluorouracil, may regulate | | | | | | | | | | | | |
| | peroxisome proliferation; | | | | | | | | | | | | |
| | alternative splicing generates | | | | | | | | | | | | |
| | nuclear and mitochondrial forms | | | | | | | | | | | | |
| KNSL7 | Kinesin-like 7 (kinesin-like | −1.41 | 0.03 | 700.06 | 484.71 | −1.72 | 1.03E−05 | 746.58 | 431.14 | 1.03 | 0.89 | 560.37 | 570.29 |
| | protein 2), a putative motor | | | | | | | | | | | | |
| | protein that may modulate | | | | | | | | | | | | |
| | mitotic progression, interacts | | | | | | | | | | | | |
| | with the forkhead-associated | | | | | | | | | | | | |
| | domain of pKi-67 (MKI67), | | | | | | | | | | | | |
| | which is a cell proliferation | | | | | | | | | | | | |
| | marker protein | | | | | | | | | | | | |
| KNSL1 | Kinesin-like 1, a microtubule- | −1.28 | 7.48E−05 | 1014.4 | 800.59 | −1.71 | 2.35E−14 | 753.82 | 440.83 | −1.16 | 0.01 | 658.34 | 565.96 |
| | associated kinesin motor that | | | | | | | | | | | | |
| | functions in mitotic spindle | | | | | | | | | | | | |
| | formation and centrosome | | | | | | | | | | | | |
| | separation, and acts | | | | | | | | | | | | |
| | antagonistically with the minus- | | | | | | | | | | | | |
| | end directed kinesin KNSL2, | | | | | | | | | | | | |
| | localization to spindle is | | | | | | | | | | | | |
| | regulated by CDC2 | | | | | | | | | | | | |
| | phosphorylation | | | | | | | | | | | | |
| CCNB2 | Cyclin B2, a CDC2 kinase- | −1.42 | 6.32E−06 | 9919.2 | 7032.51 | −1.7 | 5.03E−10 | 8702.06 | 5119.46 | −1.09 | 0.18 | 7515.61 | 6907.19 |
| | associated cyclin that is involved | | | | | | | | | | | | |
| | in Golgi apparatus disassembly, | | | | | | | | | | | | |
| | may function in p53 (TP53)- | | | | | | | | | | | | |
| | mediated cell cycle arrest at the | | | | | | | | | | | | |
| | G2/M transition, may mediate | | | | | | | | | | | | |
| | cell cycle arrest by linking | | | | | | | | | | | | |
| | CDC2 with TGFbeta type II | | | | | | | | | | | | |
| | receptor (TGFBR2) | | | | | | | | | | | | |
| CHEK2 | CHK2 checkpoint homolog, | −1.29 | 1.03E−04 | 975.21 | 754.54 | −1.7 | 3.18E−13 | 792.26 | 467.02 | 1.01 | 0.93 | 653.15 | 656.44 |
| | protein kinase involved in DNA | | | | | | | | | | | | |
| | damage response and cell cycle | | | | | | | | | | | | |
| | arrest, phosphorylated by ataxia | | | | | | | | | | | | |
| | telangiectasia mutated kinase | | | | | | | | | | | | |
| | (ATM), phosphorylates p53 | | | | | | | | | | | | |
| | (TP53) and mediates BRCA1 | | | | | | | | | | | | |
| | function; downregulated in some | | | | | | | | | | | | |
| | breast cancers | | | | | | | | | | | | |
| CDC2 | Cell division cycle 2, cyclin- | −1.3 | 2.62E−04 | 4542.3 | 3495.79 | −1.7 | 1.07E−06 | 4897.33 | 2869.04 | −1.14 | 0.11 | 4164.17 | 3682.1 |
| | dependent protein kinase that | | | | | | | | | | | | |
| | binds B-type cyclins, regulates | | | | | | | | | | | | |
| | entry of mitosis and G2 to M- | | | | | | | | | | | | |
| | phase transition, promotes cell | | | | | | | | | | | | |
| | proliferation; implicated in | | | | | | | | | | | | |
| | Alzheimers disease through | | | | | | | | | | | | |
| | phosphorylation of amyloid beta | | | | | | | | | | | | |
| | and nucleolin | | | | | | | | | | | | |
| CCNB1 | Cyclin B1, regulatory subunit of | −1.44 | 3.93E−07 | 11740 | 8158.53 | −1.69 | 1.04E−23 | 10499.04 | 6193.63 | −1.15 | 0.05 | 9515.79 | 8323.01 |
| | the CCNB1 —CDC2 maturation- | | | | | | | | | | | | |
| | promoting factor complex that | | | | | | | | | | | | |
| | mediates G2-M phase transition, | | | | | | | | | | | | |
| | plays a role in radiation-induced | | | | | | | | | | | | |
| | apoptosis, overexpression | | | | | | | | | | | | |
| | induces tetraploidy | | | | | | | | | | | | |
| KNSL4 | Kinesin-like 4, a DNA and | −1.25 | 1.14E−05 | 3350.3 | 2685.52 | −1.68 | 5.65E−19 | 2817.57 | 1684.53 | −1.07 | 0.15 | 2771.76 | 2600.21 |
| | microtubule-binding protein, | | | | | | | | | | | | |
| | associates with mitotic | | | | | | | | | | | | |
| | chromosomes and is enriched in | | | | | | | | | | | | |
| | the kinetochore during anaphase, | | | | | | | | | | | | |
| | involved in generating the away- | | | | | | | | | | | | |
| | from-the-pole force necessary | | | | | | | | | | | | |
| | for chromosome oscillation | | | | | | | | | | | | |
| | during mitosis | | | | | | | | | | | | |
| LOC51053 | Geminin, an inhibitor of DNA | −1.43 | 2.78E−09 | 6058.4 | 4204.6 | −1.67 | 6.44E−32 | 5448.87 | 3265.67 | −1.22 | 1.12E−03 | 4644.96 | 3775.2 |
| | replication that may regulate the | | | | | | | | | | | | |
| | DNA replication process by | | | | | | | | | | | | |
| | inhibiting inappropriate firing of | | | | | | | | | | | | |
| | the replication origin through | | | | | | | | | | | | |
| | binding to CDT1 | | | | | | | | | | | | |
| CKS2 | Protein that binds to | −1.14 | 0.26 | 17790 | 15646.8 | −1.67 | 1.20E−14 | 19053.8 | 11409.25 | −1.14 | 0.04 | 16638.8 | 14544.77 |
| | CDC2/CDC28 protein kinase, | | | | | | | | | | | | |
| | regulates CDK-cyclin | | | | | | | | | | | | |
| | complexes; similar to S. pombe | | | | | | | | | | | | |
| | p13suc1 | | | | | | | | | | | | |
| PRC1 | Protein regulator of cytokinesis | −1.36 | 1.04E−12 | 6118 | 4493.41 | −1.65 | 2.28E−25 | 5565.83 | 3378.6 | −1.1 | 0.03 | 4881.13 | 4455.85 |
| | 1, associates with the mitotic | | | | | | | | | | | | |
| | spindle and is required for | | | | | | | | | | | | |
| | cytokinesis but not nuclear | | | | | | | | | | | | |
| | division, may function in spindle | | | | | | | | | | | | |
| | elongation, a substrate for | | | | | | | | | | | | |
| | phosphorylation by many cyclin | | | | | | | | | | | | |
| | dependent kinases | | | | | | | | | | | | |
| TYMS | Thymidylate synthetase, | −1.13 | 0.28 | 14694 | 12991.1 | −1.65 | 8.90E−08 | 16860.03 | 10195.4 | −1.14 | 0.13 | 14876.8 | 12943.79 |
| | catalyzes the reductive | | | | | | | | | | | | |
| | methylation of dUMP to dTMP | | | | | | | | | | | | |
| | with concomitant conversion of | | | | | | | | | | | | |
| | 5,10-methylenetetrahydrofolate | | | | | | | | | | | | |
| | to dihydrofolate | | | | | | | | | | | | |
| E2-EPF | Keratinocyte ubiquitin carrier | −1.35 | 2.48E−04 | 11005 | 8132.69 | −1.65 | 1.20E−29 | 10039.67 | 6073.81 | −1.11 | 0.27 | 9649.67 | 8699.99 |
| | protein, which is required for | | | | | | | | | | | | |
| | ubiquitin-protein conjugation, | | | | | | | | | | | | |
| | links ubiquitin with a thiol ester | | | | | | | | | | | | |
| | linkage in a ubiquitin activating | | | | | | | | | | | | |
| | enzyme-dependent manner, may | | | | | | | | | | | | |
| | be associated with endemic | | | | | | | | | | | | |
| | pemphigus foliaceus (EPF) | | | | | | | | | | | | |
| SMARCD1 | SWI-SNF related matrix | −1.23 | 0.26 | 137.68 | 110.98 | −1.64 | 6.97E−07 | 196.79 | 119.78 | −1.05 | 0.73 | 176.74 | 169.51 |
| | associated actin dependent | | | | | | | | | | | | |
| | regulator of chromatin subfamily | | | | | | | | | | | | |
| | d member 1, part of complexes | | | | | | | | | | | | |
| | implicated in regulation of | | | | | | | | | | | | |
| | transcription by remodeling | | | | | | | | | | | | |
| | chromatin and involved in | | | | | | | | | | | | |
| | regulation of fetal to adult globin | | | | | | | | | | | | |
| | gene switch | | | | | | | | | | | | |
| HSPC150 | Protein with high similarity to S. | −1.32 | 1.33E−07 | 5559.4 | 4238.57 | −1.63 | 2.08E−19 | 5064.71 | 3107.47 | −1.18 | 9.95E−03 | 4533.44 | 3853.02 |
| | cerevisiae Ubc13p, which is a | | | | | | | | | | | | |
| | ubiquitin-conjugating (E2) | | | | | | | | | | | | |
| | enzyme involved in the S. | | | | | | | | | | | | |
| | cerevisiae Rad6 dependent post- | | | | | | | | | | | | |
| | replicative repair pathway, | | | | | | | | | | | | |
| | member of the ubiquitin- | | | | | | | | | | | | |
| | conjugating enzyme (E2) family | | | | | | | | | | | | |
| LSM5 | U6 snRNA-associated Sm-like | −1.21 | 2.14E−03 | 6921.7 | 5751.08 | −1.63 | 3.82E−05 | 5718.65 | 3504.33 | −1.24 | 8.24E−04 | 5998.6 | 4857.88 |
| | protein, a putative RNA-binding | | | | | | | | | | | | |
| | protein that forms a doughnut- | | | | | | | | | | | | |
| | shaped U6 snRNA-containing | | | | | | | | | | | | |
| | complex with other Sm-like | | | | | | | | | | | | |
| | proteins, may play a role in | | | | | | | | | | | | |
| | U4/U6 snRNP formation | | | | | | | | | | | | |
| SF3A3 | Spliceosome-associated protein | −1.13 | 0.53 | 706.9 | 628.91 | −1.63 | 9.67E−05 | 828.86 | 508.89 | −1.13 | 0.61 | 600.6 | 522.95 |
| | 61, a subunit of the | | | | | | | | | | | | |
| | heterotrimeric splicing factor | | | | | | | | | | | | |
| | SF3a, involved in the formation | | | | | | | | | | | | |
| | of the 17S U2 snRNP and | | | | | | | | | | | | |
| | assembly of the prespliceosome, | | | | | | | | | | | | |
| | contains a C2H2 zinc finger | | | | | | | | | | | | |
| HEC | Highly expressed in cancer, a | −1.36 | 7.33E−05 | 5357.5 | 3893.36 | −1.62 | 4.57E−11 | 4750.6 | 2931.09 | −1.11 | 0.17 | 4382.36 | 3946.21 |
| | nuclear protein that localizes to | | | | | | | | | | | | |
| | the centromere during M phase, | | | | | | | | | | | | |
| | inhibits proteolysis of M phase | | | | | | | | | | | | |
| | cyclin B, may be involved in | | | | | | | | | | | | |
| | chromosome segregation and M | | | | | | | | | | | | |
| | phase progression, high level | | | | | | | | | | | | |
| | expression is observed in cancer | | | | | | | | | | | | |
| | cells | | | | | | | | | | | | |
| FEN1 | Flap structure specific | −1.44 | 9.40E−05 | 2312.8 | 1586.37 | −1.6 | 5.76E−23 | 2088.97 | 1305.57 | −1.16 | 0.03 | 1874.86 | 1614.81 |
| | endonuclease 1, multifunctional | | | | | | | | | | | | |
| | endonuclease and exonuclease | | | | | | | | | | | | |
| | that has roles in DNA replication | | | | | | | | | | | | |
| | and repair; interaction with | | | | | | | | | | | | |
| | PCNA stimulates nuclease | | | | | | | | | | | | |
| | activity, may be involved in | | | | | | | | | | | | |
| | trinucleotide repeat expansion- | | | | | | | | | | | | |
| | related diseases | | | | | | | | | | | | |
| ZWINT | ZW10 interactor, a kinetochore | −1.37 | 1.57E−04 | 5167.1 | 3790.55 | −1.6 | 5.03E−08 | 4733.23 | 2956.31 | −1.08 | 0.34 | 4183.75 | 3883 |
| | protein with an extended coiled | | | | | | | | | | | | |
| | coil domain, interacts with | | | | | | | | | | | | |
| | ZW10 and may target it to the | | | | | | | | | | | | |
| | kinetochore at prometaphase, | | | | | | | | | | | | |
| | may have a role in centromere | | | | | | | | | | | | |
| | function | | | | | | | | | | | | |
| DTYMK | Deoxythymidylate kinase | −1.3 | 2.06E−04 | 3500.6 | 2732.79 | −1.6 | 2.98E−07 | 3297.46 | 2039.57 | −1.02 | 0.83 | 2616.54 | 2554.15 |
| | (dTMP kinase), phosphorylates | | | | | | | | | | | | |
| | dTMP to dTDP in dTTP | | | | | | | | | | | | |
| | biosynthesis, activity and | | | | | | | | | | | | |
| | transcript abundance peak in S | | | | | | | | | | | | |
| | phase, rate limiting for activating | | | | | | | | | | | | |
| | zidovudine (AZT) | | | | | | | | | | | | |
| RAD1 | RAD1 homolog (S. pombe), a 3 | −1.13 | 0.17 | 582.29 | 515.05 | −1.6 | 3.77E−05 | 502.15 | 310.68 | −1.23 | 0.08 | 579.61 | 469.97 |
| | to 5 exonuclease with predicted | | | | | | | | | | | | |
| | roles in DNA damage-activated | | | | | | | | | | | | |
| | mitotic and meiotic cell cycle | | | | | | | | | | | | |
| | checkpoints, involved in DNA | | | | | | | | | | | | |
| | repair and the DNA damage | | | | | | | | | | | | |
| | response | | | | | | | | | | | | |
| TACC3 | Transforming acidic coiled-coil | −1.33 | 3.44E−06 | 963.58 | 727.29 | −1.6 | 1.57E−23 | 948.96 | 594.38 | −1.23 | 0.04 | 822.02 | 665.45 |
| | containing protein 3, | | | | | | | | | | | | |
| | microtubule-binding protein that | | | | | | | | | | | | |
| | may regulate cell growth and | | | | | | | | | | | | |
| | microtubule nucleation; | | | | | | | | | | | | |
| | corresponding chromosomal | | | | | | | | | | | | |
| | region is disrupted in multiple | | | | | | | | | | | | |
| | myeloma | | | | | | | | | | | | |
| GTSE1 | G-2 and S-phase expressed 1, a | −1.18 | 0.29 | 566.43 | 478.95 | −1.6 | 1.30E−13 | 517.38 | 324.08 | −1.18 | 0.33 | 451.63 | 381.19 |
| | cell cycle regulated, | | | | | | | | | | | | |
| | microtubule-associated protein, | | | | | | | | | | | | |
| | ectopic expression inhibits | | | | | | | | | | | | |
| | progression through the G2 to M | | | | | | | | | | | | |
| | transition of the cell cycle | | | | | | | | | | | | |
| RRM2 | Ribonucleotide reductase | −1.48 | 5.34E−11 | 18203 | 12337.2 | −1.59 | 5.54E−11 | 16556.89 | 10390.69 | −1.17 | 0.06 | 15290.2 | 13175.31 |
| | subunit M2, associates with | | | | | | | | | | | | |
| | RRM1 to yield an enzyme that | | | | | | | | | | | | |
| | reduces ribonucleotides to | | | | | | | | | | | | |
| | deoxyribonucleotides, a rate | | | | | | | | | | | | |
| | limiting enzyme for DNA | | | | | | | | | | | | |
| | synthesis; overexpression is | | | | | | | | | | | | |
| | associated with hydroxyurea | | | | | | | | | | | | |
| | resistance | | | | | | | | | | | | |
| RAB6KIFL | RAB6 interacting kinesin-like | −1.43 | 1.22E−04 | 1113.8 | 789.17 | −1.58 | 1.33E−18 | 1025.6 | 646.53 | −1.01 | 0.91 | 927.98 | 924.07 |
| | (rabkinesin 6), a putative | | | | | | | | | | | | |
| | kinesin-like microtubule motor | | | | | | | | | | | | |
| | protein, plays a role in | | | | | | | | | | | | |
| | cytokinesis and anaphase B, may | | | | | | | | | | | | |
| | play a role in vesicular transport | | | | | | | | | | | | |
| MCM7 | Minichromosome maintenance | −1.29 | 6.78E−03 | 15180 | 11824.5 | −1.58 | 7.32E−06 | 13991.23 | 8763.58 | −1.08 | 0.41 | 12644.5 | 11783.21 |
| | deficient 7, forms a DNA | | | | | | | | | | | | |
| | dependent ATP dependent DNA | | | | | | | | | | | | |
| | helicase with MCM4 and | | | | | | | | | | | | |
| | MCM6, dissociates from | | | | | | | | | | | | |
| | replicated chromatin, likely to be | | | | | | | | | | | | |
| | involved in DNA replication | | | | | | | | | | | | |
| ANLN | Aniline, an actin binding protein | −1.43 | 1.31E−12 | 5924.3 | 4158.55 | −1.57 | 3.30E−20 | 5307.32 | 3390.98 | −1.07 | 0.12 | 4790.36 | 4474.32 |
| | that interacts with cleavage | | | | | | | | | | | | |
| | furrow proteins such as septins | | | | | | | | | | | | |
| | and may play a role in | | | | | | | | | | | | |
| | cytokinesis | | | | | | | | | | | | |
| DTYMK | Deoxythymidylate kinase | −1.35 | 1.33E−05 | 19500 | 14395.9 | −1.57 | 2.31E−14 | 17065.82 | 10894.34 | −1.15 | 0.02 | 16770.7 | 14607.91 |
| | (dTMP kinase), phosphorylates | | | | | | | | | | | | |
| | dTMP to dTDP in dTTP | | | | | | | | | | | | |
| | biosynthesis, activity and | | | | | | | | | | | | |
| | transcript abundance peak in S | | | | | | | | | | | | |
| | phase, rate limiting for activating | | | | | | | | | | | | |
| | zidovudine (AZT) | | | | | | | | | | | | |
| SNRPG | Sm core protein G, a component | −1.3 | 8.82E−06 | 50664 | 38792 | −1.57 | 1.72E−17 | 42579.99 | 27124.5 | −1.23 | 2.59E−05 | 40762.1 | 33037.4 |
| | of spliceosomal snRNPs that is | | | | | | | | | | | | |
| | involved in snRNP formation; a | | | | | | | | | | | | |
| | target of antibodies in patients | | | | | | | | | | | | |
| | with the autoimmune disease, | | | | | | | | | | | | |
| | systemic lupus erythematosus | | | | | | | | | | | | |
| CSE1L | CSE1 chromosome segregation | −1.33 | 1.40E−11 | 17651 | 13301.8 | −1.56 | 3.02E−13 | 15607.94 | 9962.65 | −1.17 | 7.55E−04 | 14700.2 | 12604.67 |
| | 1-like (yeast), importin-alpha | | | | | | | | | | | | |
| | nuclear export receptor, | | | | | | | | | | | | |
| | functions in toxin and TNF | | | | | | | | | | | | |
| | resistance and apoptosis, may | | | | | | | | | | | | |
| | regulate cell proliferation; | | | | | | | | | | | | |
| | corresponding gene is amplified | | | | | | | | | | | | |
| | in breast and colon carcinoma | | | | | | | | | | | | |
| | cell lines | | | | | | | | | | | | |
| TK1 | Thymidine kinase 1, a cytosolic | −1.34 | 1.55E−04 | 31745 | 23955.2 | −1.55 | 1.65E−07 | 28002.74 | 18016.22 | −1.25 | 0.03 | 25068 | 20107.36 |
| | form of the enzyme that | | | | | | | | | | | | |
| | synthesizes thymidylate for | | | | | | | | | | | | |
| | DNA synthesis, and activates | | | | | | | | | | | | |
| | nucleoside analog antiviral and | | | | | | | | | | | | |
| | anticancer drugs | | | | | | | | | | | | |
| RRM1 | Ribonucleotide reductase M1 | −1.36 | 6.79E−04 | 12340 | 9146.53 | −1.55 | 1.80E−04 | 11613.5 | 7473.84 | −1.05 | 0.6 | 11176 | 10706.73 |
| | subunit, may associate with | | | | | | | | | | | | |
| | either RRM2 (S-phase induced) | | | | | | | | | | | | |
| | or p53R2 (UV-induced) to yield | | | | | | | | | | | | |
| | a functional complex that | | | | | | | | | | | | |
| | reduces ribonucleotides to | | | | | | | | | | | | |
| | deoxyribonucleotides, a rate | | | | | | | | | | | | |
| | limiting step for DNA synthesis | | | | | | | | | | | | |
| ASK | Activator of S phase kinase, | −1.26 | 5.54E−06 | 1026.1 | 814.96 | −1.55 | 2.92E−21 | 930.4 | 600.22 | −1.19 | 0.04 | 860.08 | 734 |
| | binds to and activates kinase | | | | | | | | | | | | |
| | activity of CDC7 (CDC7L1), | | | | | | | | | | | | |
| | which is required for the | | | | | | | | | | | | |
| | initiation of DNA replication at | | | | | | | | | | | | |
| | the G1/S transition | | | | | | | | | | | | |
| SNRPA1 | Small nuclear ribonucleoprotein | −1.45 | 3.55E−12 | 17423 | 12054.6 | −1.54 | 6.76E−19 | 15593.29 | 10109.06 | −1.35 | 1.24E−08 | 14000.5 | 10368.48 |
| | polypeptide A, component of the | | | | | | | | | | | | |
| | U2 snRNP particle which is a | | | | | | | | | | | | |
| | required constituent of the | | | | | | | | | | | | |
| | spliceosome | | | | | | | | | | | | |
| TUBA4 | Member of the tubulin-FtzA | −1.2 | 0.02 | 20738 | 17208.3 | −1.54 | 5.19E−14 | 17826.68 | 11580.37 | −1.19 | 0.01 | 15732.1 | 13207.69 |
| | family, which are involved in | | | | | | | | | | | | |
| | polymer formation, has strong | | | | | | | | | | | | |
| | similarity to a region of mouse | | | | | | | | | | | | |
| | Tuba6, which is a structural | | | | | | | | | | | | |
| | protein that polymerizes to form | | | | | | | | | | | | |
| | microtubules | | | | | | | | | | | | |
| BCL2A1 | BCL2-related protein, a member | −1.11 | 0.08 | 4671.9 | 4226.81 | −1.53 | 2.03E−08 | 4032.4 | 2626.38 | −1.36 | 6.38E−05 | 3745.61 | 2748.61 |
| | of the Bcl-2 family of | | | | | | | | | | | | |
| | apoptosisregulators; inhibits | | | | | | | | | | | | |
| | apoptosis, promotes | | | | | | | | | | | | |
| | tumorigenesis, and may play a | | | | | | | | | | | | |
| | protective role during | | | | | | | | | | | | |
| | inflammation | | | | | | | | | | | | |
| ERH | Enhancer of rudimentary | −1.13 | 0.32 | 29487 | 25853.5 | −1.53 | 2.03E−09 | 25423.05 | 16680.14 | −1.13 | 0.23 | 24554.5 | 21682.35 |
| | (Drosophila) homolog, may | | | | | | | | | | | | |
| | function in pyrimidine | | | | | | | | | | | | |
| | metabolism and cell cycle | | | | | | | | | | | | |
| | control | | | | | | | | | | | | |
| TTK | Dual specificity serine/threonine | −1.23 | 0.05 | 640.83 | 528.12 | −1.53 | 9.09E−05 | 580.48 | 378.02 | −1.15 | 0.34 | 507.12 | 443.64 |
| | and tyrosine kinase, may play a | | | | | | | | | | | | |
| | role in IL2-induced cell cycle | | | | | | | | | | | | |
| | progression of T cells, may play | | | | | | | | | | | | |
| | a role in cartilage homeostasis | | | | | | | | | | | | |
| | modulated by TNF alpha (TNF) | | | | | | | | | | | | |
| KNSL6 | Mitotic centromere-associated | −1.21 | 1.82E−05 | 1994.9 | 1647.2 | −1.52 | 1.30E−09 | 1970.84 | 1292.04 | −1.04 | 0.48 | 1732.11 | 1670.11 |
| | kinesin (kinesin-like 6), a | | | | | | | | | | | | |
| | member of the kinesin family of | | | | | | | | | | | | |
| | microtubule-associated motor | | | | | | | | | | | | |
| | proteins involved in mitosis; | | | | | | | | | | | | |
| | interacts with kinetochore | | | | | | | | | | | | |
| | protein CENPH | | | | | | | | | | | | |
| CDC45L | Cell division cycle 45 like, | −1.2 | 0.05 | 3960.3 | 3331.41 | −1.52 | 1.45E−06 | 3616.42 | 2382.26 | −1.08 | 0.45 | 3198.3 | 2983.49 |
| | associates with ORC2L, MCM7, | | | | | | | | | | | | |
| | and POLA2, predicted to be | | | | | | | | | | | | |
| | involved in the initiation of | | | | | | | | | | | | |
| | DNA replication; corresponding | | | | | | | | | | | | |
| | gene is located in a | | | | | | | | | | | | |
| | chromosomal region frequently | | | | | | | | | | | | |
| | deleted in DiGeorge syndrome | | | | | | | | | | | | |
| H1F4 | H1 histone family member 4, | −1.2 | 0.27 | 1070.1 | 901.4 | −1.51 | 1.68E−06 | 1032.36 | 703.15 | −1.19 | 0.09 | 1097.66 | 939.89 |
| | involved in compaction of DNA | | | | | | | | | | | | |
| | into nucleosomes and high-order | | | | | | | | | | | | |
| | chromatin structures, may | | | | | | | | | | | | |
| | maintain a low methylation state | | | | | | | | | | | | |
| | in CpG-rich DNA and linker | | | | | | | | | | | | |
| | DNA, may play a role in DNA | | | | | | | | | | | | |
| | accessibility during apoptotic | | | | | | | | | | | | |
| | DNA fragmentation | | | | | | | | | | | | |
| RAD54B | RAD54B, a member of the | −1.17 | 0.05 | 366.03 | 308.11 | −1.51 | 3.69E−06 | 352.53 | 230.42 | −1.13 | 0.12 | 305.36 | 268.9 |
| | SNF2-SWI2 superfamily and | | | | | | | | | | | | |
| | ATPase that binds human | | | | | | | | | | | | |
| | RAD51 and may have a role in | | | | | | | | | | | | |
| | cell growth, mitotic | | | | | | | | | | | | |
| | recombination, and double- | | | | | | | | | | | | |
| | strand break repair, associated | | | | | | | | | | | | |
| | with primary lymphoma and | | | | | | | | | | | | |
| | colon cancer upon gene mutation | | | | | | | | | | | | |
| HMG2 | High mobility group (nonhistone | −1.31 | 6.21E−04 | 14713 | 11260.5 | −1.5 | 1.70E−11 | 12957.86 | 8610.37 | −1.06 | 0.42 | 10763.2 | 10233.57 |
| | chromosomal) protein 2, binds | | | | | | | | | | | | |
| | undamaged and cisplatin- | | | | | | | | | | | | |
| | damaged DNA, involved with | | | | | | | | | | | | |
| | HIV-1 integration and viral | | | | | | | | | | | | |
| | replication, reacts with sera of | | | | | | | | | | | | |
| | subjects having autoimmune | | | | | | | | | | | | |
| | hepatitis disease and juvenile | | | | | | | | | | | | |
| | idiopathic arthritis | | | | | | | | | | | | |
| CDC20 | Cell division cycle 20, seven | −1.35 | 2.15E−03 | 19505 | 14623.7 | −1.5 | 4.29E−08 | 16764.25 | 11109.96 | −1.06 | 0.51 | 14846.6 | 14054.45 |
| | WD repeat protein that is | | | | | | | | | | | | |
| | essential for cell division, | | | | | | | | | | | | |
| | interacts with and activates the | | | | | | | | | | | | |
| | mitotically phosphorylated form | | | | | | | | | | | | |
| | of the anaphase promoting | | | | | | | | | | | | |
| | complex, involved in mitotic | | | | | | | | | | | | |
| | spindle checkpoint activation | | | | | | | | | | | | |
| MCM10 | Homolog of Saccharomyces | −1.39 | 2.08E−07 | 693.96 | 499.14 | −1.48 | 9.70E−04 | 578.36 | 390.08 | −1.19 | 6.92E−03 | 551.71 | 461.94 |
| | cerevisiae Mcm10p, interacts | | | | | | | | | | | | |
| | with replication factors ORC2L, | | | | | | | | | | | | |
| | MCM2 and MCM6, may | | | | | | | | | | | | |
| | function in initiation of DNA | | | | | | | | | | | | |
| | replication | | | | | | | | | | | | |
| KPNB1 | Importin beta (kaxyopherin beta | −1.28 | 1.65E−03 | 2317 | 1801.94 | −1.4 | 1.16E−05 | 1978.38 | 1416.8 | −1.01 | 0.88 | 1923.44 | 1909.19 |
| | 1), a subunit of the NLS (nuclear | | | | | | | | | | | | |
| | localization signal) receptor | | | | | | | | | | | | |
| | complex, binds to the nuclear | | | | | | | | | | | | |
| | pore complex and mediates | | | | | | | | | | | | |
| | translocation of the importin | | | | | | | | | | | | |
| | alpha-NLS complex into the | | | | | | | | | | | | |
| | nucleus | | | | | | | | | | | | |
| FOXM1 | Forkhead box M1, member of | −1.38 | 8.89E−07 | 1175.3 | 853.51 | −1.37 | 2.35E−08 | 1046.96 | 762.08 | −1.15 | 0.02 | 957.6 | 837.68 |
| | the HFN-3/fork head/winged- | | | | | | | | | | | | |
| | helix family of transcription | | | | | | | | | | | | |
| | factors, has roles in cell | | | | | | | | | | | | |
| | proliferation, cell cycle control, | | | | | | | | | | | | |
| | and response to oxidative stress | | | | | | | | | | | | |
| USP15 | Ubiquitin-specific protease 15, a | −1.08 | 0.32 | 490.48 | 453.2 | −1.36 | 4.88E−05 | 461.58 | 338.04 | −1.14 | 0.31 | 456.38 | 401.43 |
| | member of the ubiquitin-specific | | | | | | | | | | | | |
| | cysteine (thiol) protease family, | | | | | | | | | | | | |
| | cleaves ubiquitin from ubiquitin- | | | | | | | | | | | | |
| | conjugated protein substrates, | | | | | | | | | | | | |
| | may play a role in growth | | | | | | | | | | | | |
| | regulation | | | | | | | | | | | | |
| I_1109838 | Protein with strong similarity to | −1.32 | 0.05 | 384.36 | 269.86 | −1.36 | 1.02E−06 | 295.27 | 215.01 | −1.58 | 2.34E−04 | 315.82 | 198.25 |
| | dihydrofolate reductase (mouse | | | | | | | | | | | | |
| | Dhfr), which catalyses NADPH- | | | | | | | | | | | | |
| | dependent reduction of | | | | | | | | | | | | |
| | dihydrofolate to tetrahydrofolate, | | | | | | | | | | | | |
| | member of the dihydrofolate | | | | | | | | | | | | |
| | reductase family | | | | | | | | | | | | |
| DNMT1 | DNA (cytosine-5-)- | −1.17 | 8.21E−03 | 8488.9 | 7236.21 | −1.25 | 9.38E−05 | 7772.65 | 6214.13 | −1.04 | 0.53 | 6919.14 | 6678.37 |
| | methyltransferase, may carry out | | | | | | | | | | | | |
| | both de novo and maintenance | | | | | | | | | | | | |
| | DNA methylation, deregulated | | | | | | | | | | | | |
| | expression may promote cellular | | | | | | | | | | | | |
| | transformation | | | | | | | | | | | | |

[1464] TABLE 3B
(SLCTHAP1)

| | | | | | | | Amino | Nucleic |
|---|---|---|---|---|---|---|---|---|
| | | | | | | | Acid | Acid |
| | | | | | | | SEQ | SEQ |
| Gene Name | Agilent | Protein | RefSeq | Unigene | GenBank | Description | ID NO. | ID NO. |
| CKS1 | I_929087 | SP:P33551 | NM_001826.1 | | BC001425.1 | | 367 | 368 |
| PTTG2 | I_957769 | GP:AAC64410.1 | NM_006607.1 | Hs.511755 | AF095288.1 | pituitary tumor-transforming 2 | 369 | 370 |
| CDKN3 | I_959891 | SP:Q16667 | NM_005192.2 | Hs.84113 | L27711.1 | cyclin-dependent kinase inhibitor | 371 | 372 |
| | | | | | | 3 (CDK2-associated dual | | |
| | | | | | | specificity phosphatase) | | |
| BUB1 | I_965088 | SP:O43683 | NM_004336.1 | Hs.287472 | AF046078.1 | BUB1 budding uninhibited by | 373 | 374 |
| | | | | | | benzimidazoles 1 homolog (yeast) | | |
| HMMR | I_957819 | SP:O75330 | NM_012484.1 | Hs.72550 | AF032862.1 | hyaluronan-mediated motility | 375 | 376 |
| | | | | | | receptor (RHAMM) | | |
| U1SNRNPBP | I_965626 | GP:AAA86654.1 | NM_007020.1; | Hs.427552 | U44799.1 | U1-snRNP binding protein | 377 | 378 |
| | | | NM_022717.1 | | | homolog | | |
| H1F5 | I_958019 | SP:P16401 | NM_005322.2 | | X83509.1 | | 381 | 382 |
| PTTG3 | I_929699 | GP:AAC64411.1 | NM_021000.1 | Hs.521097 | AF095289.1 | pituitary tumor-transforming 3 | 383 | 384 |
| TOPK | I_929157 | GP:BAA99576.1 | NM_018492.2 | Hs.104741 | AB027249.1 | T-LAK cell-originated protein | 385 | 386 |
| | | | | | | kinase | | |
| PTTG1 | I_958208 | GP:CAA11683.1 | NM_004219.2 | Hs.350966 | AJ223953.1 | pituitary tumor-transforming 1 | 387 | 388 |
| H1F3 | I_957891 | SP:P16402 | NM_005320.1 | | M60747.1 | | 389 | 390 |
| KIAA0008 | I_959284 | SP:Q15398 | NM_014750.1 | Hs.77695 | BC010658.1 | discs, large homolog 7 | 391 | 392 |
| | | | | | | (Drosophila) | | |
| CDCA7 | I_928296 | GP:AAH27966.1 | NM_031942.1 | Hs.435733 | AK027642.1 | cell division cycle associated 7 | 393 | 394 |
| BIRC5 | I_960986 | SP:O15392 | NM_001168.1 | | U75285.1 | | 395 | 396 |
| CNAP1 | I_936441 | GP:BAA09930.1 | NM_014865.1 | Hs.5719 | D63880.1 | chromosome condensation-related | 397 | 398 |
| | | | | | | SMC-associated protein 1 | | |
| FLJ10477 | I_929644 | GP:BAA91635.1 | NM_018105.1 | Hs.7432 | AK001339.1 | THAP domain containing, | 399 | 400 |
| | | | | | | apoptosis associated protein 1 | | |
| USP16 | I_962079 | SP:Q9Y5T5 | NM_006447.1 | Hs.99819 | AK023247.1 | ubiquitin specific protease 16 | 401 | 402 |
| MAD2L1 | I_957747 | SP:Q13257 | NM_002358.2 | Hs.79078 | BC000356.1 | MAD2 mitotic arrest deficient-like | 403 | 404 |
| | | | | | | 1 (yeast) | | |
| CDCA1 | I_942438 | GP:BAB59141.1 | NM_031423.1 | Hs.234545 | AF326731.1 | cell division cycle associated 1 | 405 | 406 |
| BUB1B | I_958935 | SP:O60566 | NM_001211.2 | Hs.36708 | AF053306.1 | BUB1 budding uninhibited by | 407 | 408 |
| | | | | | | benzimidazoles 1 homolog beta | | |
| | | | | | | (yeast) | | |
| DUT | I_958567 | GP:BAB13724.1 | NM_001948.1 | Hs.367676 | U31930.1 | dUTP pyrophosphatase | 409 | 410 |
| KNSL7 | I_954746 | GP:BAB03309.1 | NM_020242.1 | Hs.315051 | AB035898.1 | kinesin-like 7 | 411 | 412 |
| KNSL1 | I_931999 | SP:P52732 | NM_004523.2 | Hs.8878 | U37426.1 | kinesin family member 11 | 413 | 414 |
| CCNB2 | I_959997 | SP:O95067 | NM_004701.2 | Hs.194698 | AL080146.1 | cyclin B2 | 415 | 416 |
| CHEK2 | I_961297 | SP:O96017 | NM_007194.1 | Hs.146329 | BC004207.1 | CHK2 checkpoint homolog (S. | 417 | 418 |
| | | | | | | pombe) | | |
| CDC2 | I_933293 | SP:P06493 | NM_001786.2; | Hs.334562 | BC014563.1 | cell division cycle 2, G1 to S and | 419 | 420 |
| | | | NM_033379.1 | | | G2 to M | | |
| CCNB1 | I_958486 | SP:P14635 | NM_031966.1 | Hs.23960 | BC006510.1 | cyclin B1 | 423 | 424 |
| KNSL4 | I_959791 | SP:Q14807 | NM_007317.1 | Hs.119324 | AB017430.2 | kinesin family member 22 | 425 | 426 |
| LOC51053 | I_966815 | SP:O75496 | NM_015895.1 | Hs.234896 | BC005389.1 | geminin, DNA replication | 427 | 428 |
| | | | | | | inhibitor | | |
| CKS2 | I_931102 | SP:P33552 | NM_001827.1 | Hs.83758 | BC006458.1 | CDC28 protein kinase regulatory | 429 | 430 |
| | | | | | | subunit 2 | | |
| PRC1 | I_960183 | GP:AAH03138.1 | NM_003981.1 | Hs.344037 | BC003138.1 | protein regulator of cytokinesis 1 | 431 | 432 |
| TYMS | I_960396 | SP:P04818 | NM_001071.1 | Hs.87491 | X02308.1 | thymidylate synthetase | 433 | 434 |
| E2-EPF | I_961201 | SP:Q16763 | NM_014501.1 | Hs.396393 | M91670.1 | ubiquitin carrier protein | 435 | 436 |
| SMARCD1 | I_931943 | GP:AAH09368.1 | | Hs.79335 | BC009368.1 | SWI/SNF related, matrix | 533 | 532 |
| | | | | | | associated, actin dependent | | |
| | | | | | | regulator of chromatin, subfamily | | |
| | | | | | | d, member 1 | | |
| HSPC150 | I_929756 | GP:BAA91211.1 | NM_014176.1 | Hs.5199 | AF160215.1 | HSPC150 protein similar to | 437 | 438 |
| | | | | | | ubiquitin-conjugating enzyme | | |
| LSM5 | I_929834 | SP:Q9Y4Y9 | NM_012322.1 | Hs.424908 | AK024217.1 | LSM5 homolog, U6 small nuclear | 439 | 440 |
| | | | | | | RNA associated (S. cerevisiae) | | |
| SF3A3 | I_1221922 | SP:Q12874 | | Hs.77897 | BC011523.1 | splicing factor 3a, subunit 3, | 531 | 530 |
| | | | | | | 60 kDa | | |
| HEC | I_960629 | GP:AAB80726.1 | NM_006101.1 | Hs.414407 | AF017790.1 | highly expressed in cancer, rich in | 441 | 442 |
| | | | | | | leucine heptad repeats | | |
| FEN1 | I_931399 | SP:P39748 | NM_004111.3 | Hs.409065 | BC000323.1 | flap structure-specific | 443 | 444 |
| | | | | | | endonuclease 1 | | |
| ZWINT | I_933172 | GP:AAC78629.1 | NM_007057.2; | Hs.42650 | BC000411.1 | ZW10 interactor | 445 | 446 |
| | | | NM_032997.1 | | | | | |
| DTYMK | I_963220 | GP:CAA38528.1 | NM_012145.1 | Hs.367821 | X54729.1 | deoxythymidylate kinase | 449 | 450 |
| | | | | | | (thymidylate kinase) | | |
| RAD1 | I_957256 | GP:AAC35549.1 | NM_002853.1 | Hs.7179 | AF030933.1 | RAD1 homolog (S. pombe) | 451 | 452 |
| TACC3 | I_957372 | SP:Q9Y6A5 | NM_006342.1 | Hs.104019 | AF093543.1 | transforming, acidic coiled-coil | 453 | 454 |
| | | | | | | containing protein 3 | | |
| GTSE1 | I_961917 | GP:AAH06325.1 | NM_016426.1 | Hs.122552 | BC006325.1 | G-2 and S-phase expressed 1 | 455 | 456 |
| RRM2 | I_965619 | SP:P31350 | NM_001034.1 | Hs.226390 | X59618.1 | ribonucleotide reductase M2 | 457 | 458 |
| | | | | | | polypeptide | | |
| RAB6KIFL | I_1110379 | SP:O95235 | NM_005733.1 | Hs.73625 | AK025790.1 | kinesin family member 20A | 459 | 460 |
| MCM7 | I_929577 | GP:BAA05839.1 | NM_005916.1 | Hs.438720 | D28480.1 | MCM7 minichromosome | 461 | 462 |
| | | | | | | maintenance deficient 7 (S. | | |
| | | | | | | cerevisiae) | | |
| ANLN | I_929934 | GP:AAF75796.1 | NM_018685.1 | Hs.62180 | AF273437.1 | anillin, actin binding protein | 463 | 464 |
| | | | | | | (scraps homolog, Drosophila) | | |
| SNRPG | I_1100581 | SP:Q15357 | NM_003096.1 | Hs.436656 | BC022432.1 | small nuclear ribonucleoprotein | 465 | 466 |
| | | | | | | polypeptide G | | |
| CSE1L | I_960930 | SP:P55060 | NM_001316.1 | Hs.90073 | AF053641.1 | CSE1 chromosome segregation 1- | 467 | 468 |
| | | | | | | like (yeast) | | |
| TK1 | I_960984 | SP:P04183 | NM_003258.1 | Hs.164457 | K02581.1 | thymidine kinase 1, soluble | 469 | 470 |
| RRM1 | I_930353 | SP:P23921 | NM_001033.1 | Hs.383396 | X59543.1 | ribonucleotide reductase M1 | 471 | 472 |
| | | | | | | polypeptide | | |
| ASK | I_930306 | GP:AAD45357.1 | NM_006716.1 | Hs.152759 | AF160876.1 | activator of S phase kinase | 473 | 474 |
| SNRPA1 | I_959930 | SP:P09661 | NM_003090.1 | Hs.434901 | BC022816.1 | small nuclear ribonucleoprotein | 475 | 476 |
| | | | | | | polypeptide A′ | | |
| TUBA4 | I_933609 | GP:BAB14767.1 | NM_025019.1 | Hs.287610 | AK024002.1 | tubulin, alpha 4 | 477 | 478 |
| BCL2A1 | I_960129 | SP:Q16548 | NM_004049.2 | Hs.227817 | Y09397.1 | BCL2-related protein A1 | 479 | 480 |
| ERH | I_959366 | SP:Q14259 | NM_004450.1 | Hs.433413 | U66871.1 | enhancer of rudimentary homolog | 481 | 482 |
| | | | | | | (Drosophila) | | |
| TTK | I_966662 | SP:P33981 | NM_003318.1 | Hs.169840 | BC000633.1 | TTK protein kinase | 483 | 484 |
| KNSL6 | I_964064 | SP:Q99661 | NM_006845.2 | Hs.69360 | BC014924.1 | kinesin family member 2C | 485 | 486 |
| CDC45L | I_961013 | SP:075419 | NM_003504.2 | Hs.114311 | AF081535.1 | CDC45 cell division cycle 45-like | 487 | 488 |
| | | | | | | (S. cerevisiae) | | |
| H1F4 | I_957913 | SP:P10412 | NM_005321.1 | | M60748.1 | | 489 | 490 |
| RAD54B | I_1109914 | GP:AAD34331.1 | NM_012415.1 | Hs.128501 | AF112481.1 | RAD54B homolog | 491 | 492 |
| HMG2 | I_957632 | SP:P26583 | NM_002129.2 | Hs.434953 | X62534.1 | high-mobility group box 2 | 493 | 494 |
| CDC20 | I_931677 | GP:AAH09426.1 | | Hs.82906 | BC000624.1 | CDC20 cell division cycle 20 | 535 | 534 |
| | | | | | | homolog (S. cerevisiae) | | |
| MCM10 | I_1100848 | GP:CAB66774.1 | NM_018518.1 | Hs.198363 | AL136840.1 | MCM10 minichromosome | 495 | 496 |
| | | | | | | maintenance deficient 10 (S. | | |
| | | | | | | cerevisiae) | | |
| KPNB1 | I_960232 | SP:Q14974 | NM_002265.1 | Hs.439683 | L38951.1 | karyopherin (importin) beta 1 | 497 | 498 |
| FOXM1 | I_934617 | GP:AAC51128.1 | NM_021953.1 | Hs.511941 | U74612.1 | forkhead box M1 | 499 | 500 |
| USP15 | I_932771 | GP:BAA25455.2 | NM_006313.1 | Hs.339425 | AF106069.1 | ubiquitin specific protease 15 | 501 | 502 |
| DHFR | I_1109838 | SP:P00374 | NM_000791.2 | Hs.83765 | BC000192.1 | dihydrofolate reductase | 503 | 504 |
| DNMT1 | I_961245 | SP:P26358 | NM_001379.1 | Hs.202672 | X63692.1 | DNA (cytosine-5-)- | 505 | 506 |
| | | | | | | methyltransferase 1 | | |

[1465] No cluster of genes upregulated were found in SLC/THAP1 expressing cells. In contrast, several clusters of genes downregulated by the SLC/THAP1 complex were discerned, which were not affected when the chemokine was expressed alone (Table 3A). Most of these genes were also downregulated by THAP1 without chemokine, however the chemokine greatly enhanced their down-regulation (co-repressor effect).

[1466] We identified ˜120 candidate target genes (out of 17000 genes on the microarrays) that are downregulated in SLC/THAP1-overexpressing cells. One of these genes corresponds to THAP1 itself (FLJ10477), and many other genes correspond to predicted proteins with unknown functions. Strikingly, most of the genes encoding proteins with known functions (60 genes) that are downregulated by the SLC/THAP1 complex (Tables 3A and 4) correspond to genes encoding proteins previously linked to cell cycle/cell proliferation (Ishida et al. (2001) Mol Cell Biol 21:4684-4699; Whitfield et al. (2002) Mol Biol Cell 13:1977-2000; ): G2/M phase specific genes involved in mitosis (38 genes) and S phase specific genes involved in DNA replication or DNA repair (22 genes). Interestingly, many of these cell-cycle specific genes (26 genes, indicated in italics in Table 4) have previously shown to be regulated positively by the cell-cycle specific transcription factor E2F (Ishida et al. (2001) Mol Cell Biol 21:4684-4699; Ren et al. (2002) Genes Dev 16:245-256), suggesting that the SLC/THAP1 complex interfere some way with E2F-mediated activities. In addition to the cell cycle specific genes, genes encoding splicing factors (5 genes) and anti-apoptotic factors (2 genes including surviving) were also identified as target genes down-regulated by the SLC/THAP1 complex (Table 4). Together, these results indicated that the nuclear chemokine SLC/THAP1 complex modulate transcription profiles in human primary endothelial cells and appear to be a critical regulator of cell cycle/cell proliferation and/or survival.

TABLE 4
Target genes downregulated by the SLC/THAP1 complex
(Genes indicated in italics are E2F target genes)

| G2 and M phase cluster | | | |
|---|---|---|---|
| Mitosis | S phase cluster DNA replication | Splicing | Apoptosis |
| CKS1 | H1F5 (H1 histone family) | U1snRNPBP | BIRC5/survivin |
| (polypeptide SEQ ID NO: 367; | (polypeptide SEQ ID NO: 381; | Gi/5902144 | (polypeptide SEQ ID NO: 395; |
| nucleic acid SEQ ID NO: 368) | nucleic acid SEQ ID NO: 382) | (polypeptide SEQ ID NO: 377; | nucleic acid SEQ ID NO: 396) |
| PTTG2/securin2 | H1F3 (H1 histone family) | nucleic acid SEQ ID NO: 378) | Bc12-related protein |
| (polypeptide SEQ ID NO: 369 | (polypeptide SEQ ID NO: 389; | gi/13027642 | (polypeptide SEQ ID NO: 479; |
| nucleic acid SEQ ID NO: 370) | nucleic acid SEQ ID NO: 390) | (transcript variant 2 polypeptide | nucleic acid SEQ ID NO: 480) |
| CDKN3 | CDCA7 (c-myc target JPO1) | SEQ ID NO: 379; transcript variant | |
| (polypeptide SEQ ID NO: 371; | (polypeptide SEQ ID NO: 393; | 2 nucleic acid SEQ ID NO: 380) | |
| nucleic acid SEQ ID NO: 372) | nucleic acid SEQ ID NO: 394) | | |
| BUB1 | DUT(dUTP phosphatase) | LSM5 (U6 snRNA associated Sm-like | |
| (polypeptide SEQ ID NO: 373; | (polypeptide SEQ ID NO: 409; | protein) | |
| nucleic acid SEQ ID NO: 374) | nucleic acid SEQ ID NO: 410) | (polypeptide SEQ ID NO: 439; | |
| | | nucleic acid SEQ ID NO: 440) | |
| HMMR/RHAMM | LOC51053/Geminin | SF3A3 (spliceosome-associated | |
| (polypeptide SEQ ID NO: 375; | (polypeptide SEQ ID NO: 427; | protein 61) | |
| nucleic acid SEQ ID NO: 376) | nucleic acid SEQ ID NO: 428) | (polypeptide SEQ ID NO: 531; | |
| | | nucleic acid SEQ ID NO: 530) | |
| PTTG3/securin3 | TYMS (thymidylate synthetase) | SnRNPG (Sm core protein G) | |
| (polypeptide SEQ ID NO: 383; | (polypeptide SEQ ID NO: 433; | (polypeptide SEQ ID NO: 465; | |
| nucleic acid SEQ ID NO: 384) | nucleic acid SEQ ID NO: 434) | nucleic acid SEQ ID NO: 466) | |
| TOPK (PDZ-binding kinase) | HSPC150/Ubc13p | SnRNPA1 | |
| (polypeptide SEQ ID NO: 385; | (polypeptide SEQ ID NO: 437; | (polypeptide SEQ ID NO: 475; | |
| nucleic acid SEQ ID NO: 386) | nucleic acid SEQ ID NO: 438) | nucleic acid SEQ ID NO: 476) | |
| PTTG1/securin1 | FEN1 (flap endonuclease 1) | | |
| (polypeptide SEQ ID NO: 387; | (polypeptide SEQ ID NO: 443; | | |
| nucleic acid SEQ ID NO: 388) | nucleic acid SEQ ID NO: 444) | | |
| KIAA0008/HURP | DTYMK (dTMP kinase) | | |
| (polypeptide SEQ ID NO: 391; | (polypeptide SEQ ID NO: 449; | | |
| nucleic acid SEQ ID NO: 392) | nucleic acid SEQ ID NO: 450) | | |
| BIRC5/survivin | RAD1 | | |
| (polypeptide SEQ ID NO: 395; | (polypeptide SEQ ID NO: 451; | | |
| nucleic acid SEQ ID NO: 396) | nucleic acid SEQ ID NO: 452) | | |
| CNAP1 | RRM2 (ribonucleotide reductase 2) | | |
| (polypeptide SEQ ID NO: 397; | (polypeptide SEQ ID NO: 457; | | |
| nucleic acid SEQ ID NO: 398) | nucleic acid SEQ ID NO: 458) | | |
| USP16 | MCM7 | | |
| (polypeptide SEQ ID NO: 401; | (polypeptide SEQ ID NO: 461; | | |
| nucleic acid SEQ ID NO: 402) | nucleic acid SEQ ID NO: 462) | | |
| MAD2L1 | TKJ (thymidine kinase 1) | | |
| (polypeptide SEQ ID NO: 403; | (polypeptide SEQ ID NO: 469; | | |
| nucleic acid SEQ ID NO: 404) | nucleic acid SEQ ID NO: 470) | | |
| CDCA1 | RRM1 (ribonucleotide reductase 1) | | |
| (polypeptide SEQ ID NO: 405; | (polypeptide SEQ ID NO: 471; | | |
| nucleic acid SEQ ID NO: 406) | nucleic acid SEQ ID NO: 472) | | |
| BUB1B/BUBR1 | ASK (activator of S phase kinase) | | |
| (polypeptide SEQ ID NO: 407; | (polypeptide SEQ ID NO: 473; | | |
| nucleic acid SEQ ID NO: 408) | nucleic acid SEQ ID NO: 474) | | |
| KNSL7 (kinesin-like 7) | ERH | | |
| (polypeptide SEQ ID NO: 411; | (polypeptide SEQ ID NO: 481; | | |
| nucleic acid SEQ ID NO: 412) | nucleic acid SEQ ID NO: 482) | | |
| KNSL1 (kinesin-like 1) | CDC45L | | |
| (polypeptide SEQ ID NO: 413; | (polypeptide SEQ ID NO: 487; | | |
| nucleic acid SEQ ID NO: 414) | nucleic acid SEQ ID NO: 488) | | |
| CCNB2 (cyclinB2) | H1F4 (H1 histone family) | | |
| (polypeptide SEQ ID NO: 415; | (polypeptide SEQ ID NO: 489; | | |
| nucleic acid SEQ ID NO: 416) | nucleic acid SEQ ID NO: 490) | | |
| CHEK2 (CHK2 checkpoint) | RAD54B | | |
| (polypeptide SEQ ID NO: 417; | (polypeptide SEQ ID NO: 491; | | |
| nucleic acid SEQ ID NO: 418) | nucleic acid SEQ ID NO: 492) | | |
| CDC2 | MCM10 | | |
| (Isoform 1: polypeptide SEQ ID | (polypeptide SEQ ID NO: 495; | | |
| NO: 419; | nucleic acid SEQ ID NO: 496) | | |
| variant 2: nucleic acid SEQ ID NO: | | | |
| 420) | | | |
| isoform 2: (polypeptide SEQ ID | I_1109838/DHFR | | |
| NO: 421; | (polypeptide SEQ ID NO: 503; | | |
| variant 2: nucleic acid SEQ ID NO: | nucleic acid SEQ ID NO: 504) | | |
| 422) | | | |
| CCNB1 (cyclin B1) | DNMT1 (DNA methyltransferase) | | |
| (polypeptide SEQ ID NO: 423; | (polypeptide SEQ ID NO: 505; | | |
| nucleic acid SEQ ID NO: 424) | nucleic acid SEQ ID NO: 506) | | |
| KNSL4 (kinesin-like 4) | | | |
| (polypeptide SEQ ID NO: 425; | | | |
| nucleic acid SEQ ID NO: 426) | | | |
| CKS2 | | | |
| (polypeptide SEQ ID NO: 429; | | | |
| nucleic acid SEQ ID NO: 430) | | | |
| PRC1 | | | |
| (polypeptide SEQ ID NO: 431; | | | |
| nucleic acid SEQ ID NO: 432) | | | |
| E2-EPF | | | |
| (polypeptide SEQ ID NO: 435; | | | |
| nucleic acid SEQ ID NO: 436) | | | |
| SMARCD1 | | | |
| (polypeptide SEQ ID NO: 533; | | | |
| nucleic acid SEQ ID NO: 532) | | | |
| HEC | | | |
| (polypeptide SEQ ID NO: 441; | | | |
| nucleic acid SEQ ID NO: 442) | | | |
| ZWINT | | | |
| (polypeptide SEQ ID NO: 445; | | | |
| nucleic acid SEQ ID NO: 446) | | | |
| (polypeptide SEQ ID NO: 447; | | | |
| variant 2 | | | |
| nucleic acid SEQ ID NO: 448) | | | |
| TACC3 | | | |
| (polypeptide SEQ ID NO: 453; | | | |
| nucleic acid SEQ ID NO: 454) | | | |
| GTSE1 | | | |
| (polypeptide SEQ ID NO: 455; | | | |
| nucleic acid SEQ ID NO: 456) | | | |
| RAB6KIFL (rabkinesin 6) | | | |
| (polypeptide SEQ ID NO: 459; | | | |
| nucleic acid SEQ ID NO: 460) | | | |
| ANLN (anilin) | | | |
| (polypeptide SEQ ID NO: 463; | | | |
| nucleic acid SEQ ID NO: 464) | | | |
| CSE1L (importin alpha) | | | |
| (polypeptide SEQ ID NO: 467; | | | |
| nucleic acid SEQ ID NO: 468) | | | |
| TUBA4 | | | |
| (polypeptide SEQ ID NO: 477; | | | |
| nucleic acid SEQ ID NO: 478) | | | |
| TTK (dual specificity kinase) | | | |
| (polypeptide SEQ ID NO: 483; | | | |
| nucleic acid SEQ ID NO: 484) | | | |
| KNSL6 (kinesin-like 6) | | | |
| (polypeptide SEQ ID NO: 485; | | | |
| nucleic acid SEQ ID NO: 486) | | | |
| HMG2 | | | |
| (polypeptide SEQ ID NO: 493; | | | |
| nucleic acid SEQ ID NO: 494) | | | |
| CDC20 (p55CDC) | | | |
| (polypeptide SEQ ID NO: 535; | | | |
| nucleic acid SEQ ID NO: 534) | | | |

### Example 48

### Chemokines SLC/CCL21 and MIG/CXCL9 Modulate Transcription of Pro-inflammatory Chemokine Genes

[1467] To examine the expression of nuclear chemokines SLC/CCL21 and MIG/CXCL9, we performed DNA microarrays analysis of HUVEC cells transduced with SLC/CCL21 or MIG/CXCL9 retrovirus vectors or MCS control vector. Cluster analysis was performed based on similarity of expression patterns of genes.

[1468] Table 5A lists 5 genes encoding pro-inflammatory chemokines that are downregulated by chemokines SLC/CCL21 and MIG/CXCL9 in human primary endothelial cells, by the above-describe microarray experiments. For each chemokine gene, the fold changes, p values and signal intensities obtained in the two microarray experiments are indicated.

[1469] Table 5B lists database accession numbers and SEQ ID NOs. for each gene and corresponding polypeptide listed in Table 3A.

TABLE 5A

| | | SLC/MCSvsMCS | | | | MIG/MCSvsMC | | | |
|---|---|---|---|---|---|---|---|---|---|
| Sequence | Experiment Name | Fold | | | | Fold | | | |
| Name(s) | Sequence Description | Change | P-Value | Intensity 1 | Intensity 2 | Change | P-Value | Intensity 1 | Intensity 2 |
| GRO1 | Growth related oncogene (melanoma | −1.86 | 3.73E−07 | 41433.3 | 22300.94 | −2.47 | 1.92E−30 | 41799.53 | 17023.53 |
| | growth stimulating activity), a CXC chemokine | | | | | | | | |
| | that binds interleukin 8 receptor to mobilize | | | | | | | | |
| | intracellular calcium, acts as a leukocyte | | | | | | | | |
| | mitogenic factor with growth-regulatory and | | | | | | | | |
| | chemotactic properties during inflammation | | | | | | | | |
| GRO2 | Macrophage inflammatory protein 2, | −1.78 | 1.36E−13 | 10921.9 | 6150.59 | −2.22 | 1.00E−36 | 10778.54 | 4852.28 |
| | a member of the C-X-C chemokine family, | | | | | | | | |
| | acts as a neutrophil chemoattractant | | | | | | | | |
| | and epithelial cell mitogen | | | | | | | | |
| IL8 | Interleukin 8, a cytokine that plays a role | −1.74 | 1.77E−16 | 33425.4 | 19330.57 | −1.84 | 8.38E−24 | 32784.91 | 17940.61 |
| | in chemoattraction and activation of | | | | | | | | |
| | neutrophils, involved in immune and | | | | | | | | |
| | inflammatory responses | | | | | | | | |
| GRO3 | Melanoma growth stimulating activity | −1.49 | 0.04 | 948.15 | 627.5 | −1.82 | 6.23E−07 | 874.77 | 474.64 |
| | gamma, a chemokine and mitogenic factor, | | | | | | | | |
| | activates neutrophils and induces chemotaxis, | | | | | | | | |
| | may be involved in the inflammatory response | | | | | | | | |
| SCYA2 | Cytokine A2, CC chemokine that | −1.24 | 0.09 | 9503.27 | 7697.25 | −1.69 | 1.51E−05 | 10442.52 | 6173.76 |
| | attracts monocytes, memory T-cells, natural | | | | | | | | |
| | killer cells and endothelial cells, plays a role | | | | | | | | |
| | in the inflammatory response to infection | | | | | | | | |
| | and in inflammatory diseases including | | | | | | | | |
| | arthritis, multiple sclerosis and | | | | | | | | |
| | atherosclerosis | | | | | | | | |

[1470] TABLE 5B

| | | | | | Amino Acid | Nucleic Acid |
|---|---|---|---|---|---|---|
| Gene Name | Agilent | Protein | RefSeq | GenBank | SEQ ID NO. | SEQ ID NO. |
| GRO1 | I_957623 | SP:P09341 | NM_001511.1 | BC011976.1 | 507 | 508 |
| GRO2 | I_957614 | SP:P19875 | NM_002089.1 | BC015753.1 | 509 | 510 |
| IL8 | I_957620 | SP:P10145 | NM_000584.1 | Y00787.1 | 511 | 512 |
| GRO3 | I_957616 | SP:P19876 | NM_002090.1 | BC016308.1 | 513 | 514 |
| SCYA2 | I_959180 | SP:P13500 | NM_002982.1 | M24545.1 | 515 | 516 |

[1471] The chemokines SLC/CCL21 or MIG/CXCL9 expressed alone, induced changes in HUVEC gene expression profile characterized by distinct clusters of genes upregulated or downregulated. Interestingly, the main cluster of genes down-regulated by both SLC/CCL21 or MIG/CXCL9 corresponded to genes encoding pro-inflammatory chemokines GRO1I/CXCL1, GRO2/CXCL2, GRO3/CXCL3, IL8/CXCL8 and MCP1/CCL2 (Table 5A). Together, these results indicated that nuclear chemokines SLC/CCL21 and MIG/CXCL9 are able to modulate transcription profiles in human primary endothelial cells and may have anti-inflammatory effects by inhibiting expression of pro-inflammatory chemokines.

### Example 49

### Construction of Adenovirus Vectors for Expressing THAP-Family Polypeptides and Chemokines

[1472] This example illustrates the construction of adenovirus vectors comprising nucleic acids encoding THAP1, SLC and MIG. It will be appreciated that these methods can be applied to other THAP-family polypeptides, chemokines and/or chemokine receptors as desired.

[1473] The full-length cDNA encoding human THAP1 (SEQ ID NO: 160) is amplified from human cDNA. Similarly, mature forms (forms lacking a signal peptide) of the chemokines SLC and MIG can be amplified from human cDNA. The resulting PCR products are purified from an agarose gel and then ligated into a TA-cloning vector, such as pCR2.1 (Invitrogen, Carlsbad, Calif.). Once the cDNA insert sequence is verified by sequence analysis, the plasmid containing the insert of interest is digested to remove the cDNA insert, which is then blunt-ended with T4 DNA polymerase, gel purified and ligated into the EcoRV site of the adenoviral shuttle vectors pAvS6a to form pAvS6a-THAP1, pAvS6a-SLC or pAcS6a-MIG. Finally, a fragment which contains the cDNA insert of interest is removed from each of the pAvS6a recombinant vectors using appropriate restriction enzymes and then subcloned into pAvS6a1x (a shuttle vector containing lox site, Genetic Therapy, Inc., Gaithersburg, Md.) to generate, for example, pAvhTHAP1Ix. The expression cassettes thereby generated include the gene of interest, a constitutive RSV promoter, a 198 bp fragment containing the adeno-tripartite leader sequence, lox recombination sequence, and an SV40 early polyadenylation signal.

[1474] The recombinant adenovirus encoding human THAP1 (Av3hTHAP1), SLC (Av3hSLC) or MIG (Av3hMIG) are constructed by a rapid vector generation protocol using Cre recombinase-mediated recombination of two lox-site containing plasmids, pSQ3 (containing the right hand portion of the adenoviral vector genome), and the adenoviral shuttle plasmid pAvhTHAP1Ix (containing the left end of the viral genome and the hTHAP1 expression cassette) pAvhSLCIx or pAvhMIGIx. The pSQ3 (digested with ClaI), pAvhTHAP1Ix, pAvhSLCIx or pAvhMIGIx (linerarized with NotI), and the Cre-encoding plasmid, pC-Cre3.1, are cotransfected using CaPO₄ (Promega's Profection kit) into S8 cells (A549 cells stably transfected with E1/E2a regions under dexamethasone inducible promoters (Gorziglia et al., J. Virol. 6:41734178, 1996). Following treatment with dexamethasone the plasmids are joined by Cre-mediated recombination, generating the adenovirus encoding THAP1 (Av3hTHAP1), SLC (Ac3hSLC) or MIG (Av3hMIG). A control vector, Av3Null is generated in a similar manner, but lacks a transgene.

[1475] To amplify the virus, the S8 cells are harvested a week after transfection and passaged until a cytopathic effect (CPE) is observed. For the passage, cells are freeze/thawed to obtain a crude viral lysate (CVL), which is centrifuged to remove the cell debris and then used to infect fresh S8 cells. Cells are harvested when CPE is observed (typically after one week). DNA is isolated from the CVL and the appropriate cre-lox mediated recombination event is confirmed by restriction digest. For purification of the vector, cell pellets are freeze/thawed and the cell debris are pelleted by centrifugation. The supernatant is loaded on a discontinuous Cesium Chloride gradient (1.25 g/ml CsCl and 1.4 g/ml CsCl) and centrifuged for 1 hr at 28,000 rpm (in a SW28 swing bucket rotor). The bottom viral band is pulled from the gradient and centrifuged on a CsCl continuous gradient (1.33 g/ml CsCl) overnight at 60,000 rpm (in an NVT-65 rotor). The purified viral band is pulled from the gradient, glycerol is added to a final concentration of 10% and the mixture is then dialyzed in 200 mM Tris pH 8.0, 50 mM Hepes, 10% glycerol. The concentration of vector can be determined by spectrophotometric analysis (Mittereder et al., J. Virol. 70:7498-7509, 1996). Purified vector is then aliquoted and stored at −70° C.

[1476] Av3hTHAP1, AV3hSLC and Av3hMIG vector expression is examined in HUVEC cells. The cells are treated for 1 hour with varying multiplicities of infection of Av3hTHAP1, AV3hSLC, Av3hMIG or Av3Null or left untreated. Two days following treatment, cell extracts are prepared and Western blot analysis is performed using an antibody specific for THAP1, SLC or MIG. The biological activity of the expressed THAP1 protein is confirmed using the serum starvation assays as described in Examples 10 and 11. Alternatively, the effect of THAP1, SLC, MIG, or combinations of these polypeptides on gene transcription can be determined by comparing transcriptional activities of cells transfected with one or more of Av3hTHAP1, AV3hSLC, Av3hMIG with the transcriptional activities of cells transfected with Av3Null. Assays for determining gene expression as well as several genes modified by THAP1 and THAP1/chemokine complexes have been described in Examples 44-47.

[1477] It will be appreciated by one of ordinary skill in the art, that vectors which express a both a chemokine as well as a THAP-family polypeptide or biologically active fragment thereof can also be constructed using the methods described above. Additionally, a skilled artisan will recognize that vectors other than adenovirus vectors can be use generate constructs capable of expressing a chemokine and/or a THAP-family polypeptide or a biologically active fragment thereof. Such vectors include, but are not limited to, adenovirus associated vectors, lentivirus vectors and retrovirus vectors. Additionally, non-viral vector may be used.

### Example 50

### Expression of THAP-Family Polypeptides and Chemokines in a Mouse Model of Rheumatoid Arthritis

[1478] This example illustrates the use of adenovirus vectors to deliver nucleic acids encoding THAP1, SLC, MIG or combinations of these polypeptides to inflamed tissue in a mouse model for rheumatoid arthritis, the well-known collagen-induced arthritis model.

[1479] Male DBA/1 mice are prepared as in Example 36 above. For viral dosing of mice, the DBA/1 mice are administered recombinant adenoviruses via tail vein injection using a 0.5 ml tuberculin syringe at doses of 0.6-1.2×10¹¹ viral particles/animal. Four groups of animals (n=5-15/group) are treated with either Av3hTHAP1, Av3hSLC, Av3hMIG, combinations of these recombinant viruses, Av3Null or buffer only.

[1480] The incidence and severity of arthritis is monitored in a blind study. Each paw is assigned a score from 0 to 4 as follows: 0=nortnal; 1=swelling in 1 to 3 digits; 2=mild swelling in ankles, forepaws, or more than 3 digits; 3=moderate swelling in multiple joints; 4=severe swelling with loss of function. Each paw is totaled for a cumulative score/mouse. The cumulative scores are then totaled for mice in each group for a mean clinical score. The capacity for THAP1 or THAP1/chemokine combinations to reduce the disease incidence and severity of arthritis is determined by comparison of the treatment groups to the control groups.

[1481] It will be appreciated by one of ordinary skill in the art that expression of a chemokine and/or a THAP-family polypeptide or a biologically active fragment thereof can be used to ameliorate the symptoms associated with any THAP-related condition. In some embodiments such expression can be the result of gene therapy.

[1482] The methods, compositions, and devices described herein are presently representative of preferred embodiments and are exemplary and are not intended as limitations on the scope of the invention. Changes therein and other uses will occur to those skilled in the art which are encompassed within the spirit of the invention and are defined by the scope of the disclosure. Accordingly, it will be apparent to one skilled in the art that varying substitutions and modifications may be made to the invention disclosed herein without departing from the scope and spirit of the invention.

[1483] As used in the claims below and throughout this disclosure, by the phrase “consisting essentially of” is meant including any elements listed after the phrase, and limited to other elements that do not interfere with or contribute to the activity or action specified in the disclosure for the listed elements. Thus, the phrase “consisting essentially of” indicates that the listed elements are required or mandatory, but that other elements are optional and may or may not be present depending upon whether or not they affect the activity or action of the listed elements.

### REFERENCES

[1484] Numerous literature and patent references have been cited in the present application. All references cited are incorporated by reference herein in their entireties.

[1485] For some references, the complete citation is in the body of the text. For other references the citation in the body of the text is by author and year, the complete citation being as follows:

[1486] Alcalay, M., Tomassoni, L., Colombo, E., Stoldt, S., Grignani, F., Fagioli, M., Szekely, L., Helin, K., and Pelicci, P. G. (1998). The promyelocytic leukemia gene product (PML) forms stable complexes with the retinoblastoma protein. Mol Cell Biol 18, 1084-93.

[1487] Arcone, et al., Nucl. Acids Res., 16(8): 3195-3207, 1988.

[1488] Baichwal and Sugden, In: Gene Transfer, Kucherlapati R, ed., New York, Plenum Press, pp. 117-148, 1986.

[1489] Barradas, M., Monjas, A., Diaz-Meco, M. T., Serrano, M., and Moscat, J. (1999). The downregulation of the pro-apoptotic protein Par4 is critical for Ras-induced survival and tumor progression. Embo J 18, 6362-9.

[1490] Bartlett et al., Proc. Nat Acad Sci. USA, 93:8852-8857, 1996.

[1491] Benvenisty and Neshif, Proc. Nat Acad Sci. USA, 83:9551-9555, 1986.

[1492] Berra, E., Municio, M. M., Sanz, L., Frutos, S., Diaz-Meco, M. T., and Moscat, J. (1997). Positioning atypical protein kinase C isoforms in the UV-induced apoptotic signaling cascade. Mol Cell Biol 17, 4346-54.

[1493] Bloch, D. B., Chiche, J. D., Orth, D., de la Monte, S. M., Rosenzweig, A., and Bloch, K. D. (1999). Structural and functional heterogeneity of nuclear bodies. Mol Cell Biol 19, 4423-30.

[1494] Boghaert E. R. et al, Cell Growth Differ. 1997 Aug.;8(8):881-90 Burge, C., Karlin, S. (1997) Prediction of complete gene structures in human genomic DNA. J. Mol. Biol. 268, 78-94

[1495] Carter and Flotte, Ann. N. Y Acad Sci., 770:79-90, 1995.

[1496] Chattedee, et al., Ann. N. Y Acad Sci., 770:79-90, 1995.

[1497] Chen and Okayama, Mol. Cell Biol., 7:2745-2752, 1987.

[1498] Coffin, In: Virology, ed., New York: Raven Press, pp. 143 7-15 00, 1990.

[1499] Coupar et.al., Gene, 68:1-10, 1988.

[1500] Dani, et al., J Biol. Chem., 264:10119-10125, 1989.

[1501] Diaz-Meco, M. T., Municio, M. M., Frutos, S., Sanchez, P., Lozano, J., Sanz, L., and Moscat, J. (1996). The product of Par4, a gene induced during apoptosis, interacts selectively with the atypical isoforms of protein kinase C. Cell 86, 777-86.

[1502] Dubensky et al., Proc. Nat'l Acad Sci. USA, 81:7529-7533, 1984.

[1503] Fechheimer et al., Proc. Nat Acad. Sci. USA, 84:8463-8467, 1987.

[1504] Felsenstein, J. 1989. PHYLIP—Phylogeny Inference Package (Version 3.2). Cladistics 5: 164-166.

[1505] Ferkol et al., FASEB J., 7:1081-1091, 1993.

[1506] Ferrari et al., J Virol., 70:3227-3234, 1996.

[1507] Fisher et al., J Virol., 70:520-532, 1996.

[1508] Flotte et al., Proc. Nat'l Acad. Sci. USA, 90:10613-10617, 1993.

[1509] Fogal, V., Gostissa, M., Sandy, P., Zacchi, P., Stemsdorf, T., Jensen, K., Pandolfi, P. P., Will, H., Schneider, C., and Del Sal, G. (2000). Regulation of p53 activity in nuclear bodies by a specific PML isoform. Embo J 19, 6185-95.

[1510] Fraley et al., Proc. Nat'l Acad. Sci. USA, 76:3348-3352, 1979.

[1511] Friedmann, “Progress toward human gene therapy,” Science, 244:1275-1281, 1989.

[1512] Ghosh and Bachhawat, In: Liver diseases, targeted diagnosis and therapy using specific receptors and ligands, (Wu G, Wu C ed,), New York: Marcel Dekker, pp. 87 104, 1991.

[1513] Girard, J. P., Baekkevold, E. S., Feliu, J., P, B., and Amalric, F. (1999). Molecular cloning and functional analysis of SUT-1, a sulfate transporter from human high endothelial venules. Proc Natl Acad Sci USA 96:12772-12777.

[1514] Girard, J. P., Baekkevold, E. S., Yamanaka, T., Haraldsen, G., Brandtzaeg, P., and Amalric, F. (1999). Heterogeneity of endothelial cells: the specialized phenotype of human high endothelial venules characterized by suppression subtractive hybridization. Am J Pathol 155:2043-2055.

[1515] Girard, J. P., and Springer, T. A. (1995). Cloning from purified high endothelial venule cells of hevin, a close relative of the antiadhesive extracellular matrix protein SPARC. Immunity 2, 113-123.

[1516] Goodman et al., Blood, 84:1492-1500, 1994.

[1517] Gopal, Mol. Cell Biol., 5:1188-1190, 1985.

[1518] Gossen and Bujard, Proc. Nat Acad. Sci. USA, 89:5547-5551, 1992.

[1519] Gossen et al., Science, 268:1766-1769, 1995.

[1520] Graham and Van Der Eb, Virology, 52:456-467, 1973.

[1521] Guo, Q., Fu, W., Xie, J., Luo, H., Sells, S. F., Geddes, J. W., Bondada, V., Rangnekar, V. M., and Mattson, M. P. (1998). Par4 is a mediator of neuronal degeneration associated with the pathogenesis of Alzheimer disease. Nat Med 4, 957-62.

[1522] Hay et al., J Mol. Biol., 175:493-510, 1984.

[1523] Hearing and Shenk, J Mol. Biol. 167:809-822, 1983.

[1524] Hearing et al., J Virol., 67:2555-2558, 1987.

[1525] Higgins, D. G., Thompson, J. D. and Gibson, T. J. (1996) Using CLUSTAL for multiple sequence alignments. Methods Enzymol., 266, 383-402.

[1526] Horowitz, Yandell, Park, Canning, Whyte, Buchkovich, Harlow, Weinberg, Dryja, “Point mutational inactivation of the retinoblastoma antioncogene,” Science 243, 937 940, 1989.

[1527] Hunt et al., Proc. Nat Acad. Sci. USA, 83:3786-3790, 1986.

[1528] Ishov, A. M., Sotnikov, A. G., Negorev, D., Vladimirova, O. V., Neff, N., Kamitani, T., Yeh, E. T., Strauss, J. F., 3rd, and Maul, G. G. (1999). PML is critical for ND10 formation and recruits the PML-interacting protein daxx to this nuclear structure when modified by SUMO-1. J Cell Biol 147, 221-34.

[1529] Jareborg N, Bimey E, Durbin R. Genome Res. 1999 Sep.;9(9):815-24.

[1530] Jentsch, S., and Pyrowolakis, G. (2000). Ubiquitin and its kin: how close are the family ties? Trends Cell Biol 10, 335-42.

[1531] Johnstone, R. W., See, R. H., Sells, S. F., Wang, J., Muthukkumar, S., Englert, C., Haber, D. A., Licht, J. D., Sugrue, S. P., Roberts, T., Rangnekar, V. M., and Shi, Y. (1996). A novel repressor, Par4, modulates transcription and growth suppression functions of the Wilms' tumor suppressor WT1. Mol Cell Biol 16, 6945-56.

[1532] Joki et al., Human Gene Ther., 6:1507-1513, 1995.

[1533] Kageyama, et al., J Biol. Chem., 262(5):2345-2351, 1987.

[1534] Kaneda et al., Science, 243:375-378, 1989.

[1535] Kaplitt et al., Nat Genet., 8:148-153, 1994.

[1536] Kato et al, J Biol. Chem., 266:3361-3364, 1991.

[1537] Kessler et al., Proc. Nat Acad. Sci. USA, 93:14082-14087, 1996.

[1538] Klein et al., Nature, 327:70-73, 1987.

[1539] Koeberl et al., Proc. Nat 7 Acad. Sci. USA, 94:1426-1431, 1997.

[1540] Korhonen et al., Blood, 86:1828-1835, 1995.

[1541] Lallemand-Breitenbach, V., Zhu, J., Puvion, F., Koken, M., Honore, N., Doubeikovsky, A., Duprez, E., Pandolfi, P. P., Puvion, E., Freemont, P., and de The, H. (2001). Role of Promyelocytic Leukemia (PML) Sumolation in Nuclear Body Formation, 11S Proteasome Recruitment, and As(2)O(3)-induced PML or PML/Retinoic Acid Receptor alpha Degradation. J Exp Med 193, 1361-72.

[1542] LaMorte, V. J., Dyck, J. A., Ochs, R. L., and Evans, R. M. (1998). Localization of nascent RNA and CREB binding protein with the PML-containing nuclear body. Proc Natl Acad Sci USA 95, 4991-6.

[1543] Levrero et al., Gene, 101: 195-202, 1991.

[1544] Li, H., Leo, C., Zhu, J., Wu, X., O'Neil, J., Park, E. J., and Chen, J. D. (2000). Sequestration and inhibition of Daxx-mediated transcriptional repression by PML. Mol Cell Biol 20, 1784-96.

[1545] Mann et al., Cell, 33:153-159, 1983.

[1546] Mattson, M. P., Duan, W., Chan, S. L., and Camandola, S. (1999). Par4: an emerging pivotal player in neuronal apoptosis and neurodegenerative disorders. J Mol Neurosci 13, 17-30.

[1547] Maul, G. G., Negorev, D., Bell, P., and Ishov, A. M. (2000). Review: properties and assembly mechanisms of ND10, PML bodies, or PODs. J Struct Biol 129, 278-87.

[1548] Melchior, F. (2000). SUMO—nonclassical ubiquitin. Annu Rev Cell Dev Biol 16, 591-626.

[1549] Mizukami et al., Virology, 217:124-130, 1996.

[1550] Muller, S., Matunis, M. J., and Dejean, A. (1998). Conjugation with the ubiquitin-related modifier SUMO-1 regulates the partitioning of PML within the nucleus. Embo J 17, 61-70.

[1551] McCown et al., Brain Res., 713:99-107, 1996.

[1552] Nicolas and Rubenstein, In: Vectors: A survey of molecular cloning vectors and their uses, Rodriguez and Denhardt (eds.), Stoneham: Butterworth, pp. 493-513, 1988.

[1553] Nicolau and Sene, Biochim. Biophys. Acta, 721:185-190, 1982.

[1554] Nicolau et al., Methods Enzymol., 149:157-176, 1987.

[1555] Olivierio, et al., EMBO J, 6(7):1905-1912, 1987.

[1556] Page, G., Kogel, D., Rangnekar, V., and Scheidtmann, K. H. (1999). Interaction partners of Dlk/ZIP kinase: co-expression of Dlk/ZIP kinase and Par4 results in cytoplasmic retention and apoptosis. Oncogene 18, 7265-73.

[1557] Pape and Kim, Mol. Cell. Biol., 974-982, 1989.

[1558] Paskind et al., Virology, 67:242-248, 1975.

[1559] Perales et al., Proc. Nat Acad Sci. 91:4086-4090, 1994.

[1560] Ping et al., Microcirculation, 3:225-228, 1996.

[1561] Poli and Cortese, Proc. Nat'l Acad Sci. USA, 86:8202-8206, 1989.

[1562] Potter et al., Proc. Nat Acad. Sci. USA, 81:7161-7165, 1984.

[1563] Prowse and Baumann, Mol Cell Biol, 8(l):42-51, 1988.

[1564] Quignon, F., De Bels, F., Koken, M., Feunteun, J., Ameisen, J. C., and de The, H. (1998). PML induces a novel caspase-independent death process. Nat Genet 20, 259-65.

[1565] Radler et al., Science, 275:810-814, 1997. Rb Protein Inhibits p84N5-induced Apoptosis, 10:3261, October 1999.

[1566] Ridgeway, In: Vectors: A survey of molecular cloning vectors and their uses, Rodriguez R L, Denhardt D T, ed., Stoneham:Butterworth, pp. 467-492, 1988.

[1567] Rippe et al., Mol. Cell Biol., 10:689-695, 1990.

[1568] Ron et al., Mol. Cell. Biol., 2887-2895, 1991.

[1569] Roux et al., Proc. Nat Acad. Sci. USA, 86:9079-9083, 1989.

[1570] Ruggero, D., Wang, Z. G., and Pandolfi, P. P. (2000). The puzzling multiple lives of PML and its role in the genesis of cancer. Bioessays 22, 827-35.

[1571] Sells, S. F., Han, S. S., Muthukkumar, S., Maddiwar, N., Johnstone, R., Boghaert, E., Gillis, D., Liu, G., Nair, P., Monnig, S., Collini, P., Mattson, M. P., Sukhatme, V. P., Zimmer, S. G., Wood, D. P., Jr., McRoberts, J. W., Shi, Y., and Rangnekar, V. M. (1997). Expression and function of the leucine zipper protein Par4 in apoptosis. Mol Cell Biol 17, 3823-32.

[1572] Speigelman, et al., J Biol. Chem., 264(3), 1811-1815, 1989.

[1573] Stemsdorf, T., Jensen, K., Reich, B., and Will, H. (1999). The nuclear dot protein sp100, characterization of domains necessary for dimerization, subcellular localization, and modification by small ubiquitin-like modifiers. J Biol Chem 274, 12555-66.

[1574] Tartaglia, Ayres, Wong, and Goeddel, “A novel domain within the 55 kd TNF receptor signals cell death,” Cell 74, 845-853, 1993.

[1575] Temin, In: Gene Transfer, Kucherlapati (ed.), New York: Plenum Press, pp. 149-188, 1986.

[1576] Tibbetts Cell, 12:243-249, 1977.

[1577] Tur-Kaspa et al., Mol. Cell Biol., 6:716-718, 1986.

[1578] Wagner et al., Proc. Nat'l Acad. Sci. 87(9):3410-3414, 1990.

[1579] Walther and Stein, J Mol. Med, 74:379-392, 1996.

[1580] Wang, Z. G., Delva, L., Gaboli, M., Rivi, R., Giorgio, M., Cordon-Cardo, C., Grosveld, F., and Pandolfi, P. P. (1998). Role of PML in cell growth and the retinoic acid pathway. Science 279, 1547-51.

[1581] Wang, Z. G., Ruggero, D., Ronchetti, S., Zhong, S., Gaboli, M., Rivi, R., and Pandolfi, P. P. (1998). PML is essential for multiple apoptotic pathways. Nat Genet 20, 266-72.

[1582] Watt et al., Proc. Nat'l Acad Sci., 83(2): 3166-3170, 1986.

[1583] Wilson, et al., Mol. Cell. Biol., 6181-6191, 1990.

[1584] Wong et al., Gene, 10:87-94, 1980.

[1585] Wu and Wu, Adv. Drug Delivery Rev., 12:159-167, 1993.

[1586] Wu and Wu, Biochem., 27:887-892, 1988.

[1587] Wu and Wu, J Biol. Chem., 262:4429-4432, 1987.

[1588] Xiao et al., J Virol., 70:8098-8108, 1996.

[1589] Yang et al., Proc. Nat Acad. Sci USA, 87:9568-9572, 1990.

[1590] Yeh, E. T., Gong, L., and Kamitani, T. (2000). Ubiquitin-like proteins: new wines in new bottles. Gene 248, 1-14.

[1591] Zechner, et al., Mol. Cell. Biol., 23 94-2401, 1988.

[1592] Zhong, S., Hu, P., Ye, T. Z., Stan, R., Ellis, N. A., and Pandolfi, P. P. (1999). A role for PML and the nuclear body in genomic stability. Oncogene 18, 7941-7.

[1593] Zhong, S., Muller, S., Ronchetti, S., Freemont, P. S., Dejean, A., and Pandolfi, P. P. (2000). Role of SUMO-1-modified PML in nuclear body formation. Blood 95, 2748-52.

[1594] Zhong, S., Salomoni, P., and Pandolfi, P. P. (2000). The transcriptional role of PML and the nuclear body. Nat Cell Biol 2, E85-90.

[1595] Zhong, S., Salomoni, P., Ronchetti, S., Guo, A., Ruggero, D., and Pandolfi, P. P. (2000). Promyelocytic leukemia protein (PML) and Daxx participate in a novel nuclear pathway for apoptosis. J Exp Med 191, 631-40.

[1596] The disclosure of each of the above-listed references and all other references cited herein are expressely incorporated herein by reference in their entireties.

The application's sequence listing, which the Patent Office published only in electronic form, follows.

SEQUENCE LISTING (535 sequences)

SEQ ID NO: 1 - protein, 74 aa, Artificial Sequence
  THAP domain consensus
  UNSURE 2-5, 7-21, 23-31, 33-49, 51-52, 55-73: Xaa = any of the twenty amino acids
CXXXXCXXXXXXXXXXXXXXXPXXXXXXXXXWXXXXXXXXXXXXXXXXXCXXHFXXXXXXXXXXXXXXXXXXXP

SEQ ID NO: 2 - protein, 81 aa, Artificial Sequence
  THAP domain consensus
  UNSURE 3-4, 6-9, 11-21, 24, 27-35, 37-41, 43-53, 56, 59-62, 64-71,74-75, 80: Xaa = any of the twenty amino acids
MPXXCXXXXCXXXXXXXXXXXFHXFPXXXXXXXXXWXXXXXRXXXXXXXXXXXCSXHFXXXXFXXXXXXXXLKXXAVPTXF

SEQ ID NO: 3 - protein, 213 aa, Homo sapiens
MVQSCSAYGCKNRYDKDKPVSFHKFPLTRPSLCKEWEAAVRRKNFKPTKYSSICSEHFTPDCFKRECNNKLLKENAVPTIFLCTEPHDKKEDLLEPQEQLPPPPLPPPVSQVDAAIGLLMPPLQTPVNLSVFCDHNYTVEDTMHQRKRIHQLEQQVEKLRKKLKTAQQRCRRQERQLEKLKEVVHFQKEKDDVSERGYVILPNDYFEIVEVPA

SEQ ID NO: 4 - protein, 228 aa, Homo sapiens
MPTNCAAAGCATTYNKHINISFHRFPLDPKRRKEWVRLVRRKNFVPGKHTFLCSKHFEASCFDLTGQTRRLKMDAVPTIFDFCTHIKSMKLKSRNLLKKNNSCSPAGPSNLKSNISSQQVLLEHSYAFRNPMEAKKRIIKLEKEIASLRRKMKTCLQKERRATRRWIKATCLVKNLEANSVLPKGTSEHMLPTALSSLPLEDFKILEQDQQDKTLLSLNLKQTKSTFI

SEQ ID NO: 5 - protein, 239 aa, Homo sapiens
MPKSCAARQCCNRYSSRRKQLTFHRFPFSRPELLKEWVLNIGRGNFKPKQHTVICSEHFRPECFSAFGNRKNLKHNAVPTVFAFQDPTQQVRENTDPASERGNASSSQKEKVLPEAGAGEDSPGRNMDTALEELQLPPNAEGHVKQVSPRRPQATEAVGRPTGPAGLRRTPNKQPSDHSYALLDLDSLKKKLFLTLKENEKLRKRLQAQRLVMRRMSSRLRACKGHQGLQARLGPEQQS

SEQ ID NO: 6 - protein, 577 aa, Homo sapiens
MVICCAAVNCSNRQGKGEKRAVSFHRFPLKDSKRLIQWLKAVQRDNWTPTKYSFLCSEHFTKDSFSKRLEDQHRLLKPTAVPSIFHLTEKKRGAGGHGRTRRKDASKATGGVRGHSSAATGRGAAGWSPSSSGNPMAKPESRRLKQAALQGEATPRAAQEAASQEQAQQALERTPGDGLATMVAGSQGKAEASATDAGDESATSSIEGGVTDKSGISMDDFTPPGSGACKFIGSLHSYSFSSKHTRERPSVPREPIDRKRLKKDVEPSCSGSSLGPDKGLAQSPPSSSLTATPQKPSQSPSAPPADVTPKPATEAVQSEHSDASPMSINEVILSASGACKLIDSLHSYCFSSRQNKSQVCCLREQVEKKNGELKSLRQRVSRSDSQVRKLQEKLDELRRVSVPYPSSLLSPSREPPKMNPVVEPLSWMLGTWLSDPPGAGTYPTLQPFQYLEEVHISHVGQPMLNFSFNSFHPDTRKPMHRECGFIRLKPDTNKVAFVSAQNTGVVEVEEGEVNGQELCIASHSIARISFAKEPHVEQITRKFRLNSEGKLEQTVSMATTTQPMTQHLHVTYKKVTP

SEQ ID NO: 7 - protein, 395 aa, Homo sapiens
MPRYCAAICCKNRRGRNNKDRKLSFYPFPLHDKERLEKWLKNMKRDSWVPSKYQFLCSDHFTPDSLDIRWGIRYLKQTAVPTIFSLPEDNQGKDPSKKKSQKKNLEDEKEVCPKAKSEESFVLNETKKNIVNTDVPHQHPELLHSSSLVKPPAPKTGSIQNNMLTLNLVKQHTGKPESTLETSVNQDTGRGGFHTCFENLNSTTITLTTSNSESIHQSLETQEVLEVTTSHLANPNFTSNSMEIKSAQENPFLFSTINQTVEELNTNKESVIAIFVPAENSKPSVNSFISAQKETTEMEDTDIEDSLYKDVDYGTEVLQIEHSYCRQDINKEHLWQKVSKLHSKITLLELKEQQTLGRLKSLEALIRQLKQENWLSEENVKIIENHFTTYEVTMI

SEQ ID NO: 8 - protein, 222 aa, Homo sapiens
MVKCCSAIGCASRCLPNSKLKGLTFHVFPTDENIKRKWVLAMKRLDVNAAGIWEPKKGDVLCSRHFKKTDFDRSAPNIKLKPGVIPSIFDSPYHLQGKREKLHCRKNFTLKTVPATNYNHHLVGASSCIEEFQSQFIFEHSYSVMDSPKKLKHKLDHVIGELEDTKESLRNVLDREKRFQKSLRKTIRELKDECLISQETANRLDTFCWDCCQESIEQDYIS

SEQ ID NO: 9 - protein, 309 aa, Homo sapiens
MPRHCSAAGCCTRDTRETRNRGISFHRLPKKDNPRRGLWLANCQRLDPSGQGLWDPASEYIYFCSKHFEEDCFELVGISGYHRLKEGAVPTIFESFSKLRRTTKTKGHSYPPGPPEVSRLRRCRKRCSEGRGPTTPFSPPPPADVTCFPVEEASAPATLPASPAGRLEPGLSSPFSDLLGPLGAQADEAGCSAQPSPERQPSPLEPRPVSPSAYMLRLPPPAGAYIQNEHSYQVGSALLWKRRAEAALDALDKAQRQLQACKRREQRLRLRLTKLQQERAREKRAQADARQTLKEHVQDFAMQLSSSMA

SEQ ID NO: 10 - protein, 274 aa, Homo sapiens
MPKYCRAPNCSNTAGRLGADNRPVSFYKFPLKDGPRLQAWLQHMGCEHWVPSCHQHLCSEHFTPSCFQWRWGVRYLRPDAVPSIFSRGPPAKSQRRTRSTQKPVSPPPPLQKNTPLPQSPAIPVSGPVRLVVLGPTSGSPKTVATMLLTPLAPAPTPERSQPEVPAQQAQTGLGPVLGALQRRVRRLQRCQERHQAQLQALERLAQQLHGESLLARARRGLQRLTTAQTLGPEESQTFTIICGGPDIAMVLAQDPAPATVDAKPELLDTRIPSA

SEQ ID NO: 11 - protein, 903 aa, Homo sapiens
MTRSCSAVGCSTRDTVLSRERGLSFHQFPTDTIQRSKWIRAVNRVDPRSKKIWIPGPGAILCSKHFQESDFESYGIRRKLKKGAVPSVSLYKIPQGVHLKGKARQKILKQPLPDNSQEVATEDHNYSLKTPLTIGAEKLAEVQQMLQVSKKRLISVKNYRMIKKRKGLRLIDALVEEKLLSEETECLLRAQFSDFKWELYNWRETDEYSAEMKQFACTLYLCSSKVYDYVRKILKLPHSSILRTWLSKCQPSPGFNSNIFSFLQRRVENGDQLYQYCSLLIKSIPLKQQLQWDPSSHSLQGFMDFGLGKLDADETPLASETVLLMAVGIFGHWRTPLGYFFVNRASGYLQAQLLRLTIGKLSDIGITVLAVTSDATAHSVQMAKALGIHIDGDDMKCTFQHPSSSSQQIAYFFDSCHLLRLIRNAFQNFQSIQFINGIAHWQHLVELVALEEQELSNMERIPSTLANLKNHVLKVNSATQLFSESVASALEYLLSLDLPPFQNCIGTIHFLRLINNLFDIFNSRNCYGKGLKGPLLPETYSKINHVLIEAKTIFVTLSDTSNNQIIKGKQKLGFLGFLLNAESLKWLYQNYVFPKVMPFPYLLTYKFSHDHLELFLKMLRQVLVTSSSPTCMAFQKAYYNLETRYKFQDEVFLSKVSIFDISIARRKDLALWTVQRQYGVSVTKTVFHEEGICQDWSHCSLSEALLDLSDHRRNLICYAGYVANKLSALLTCEDCITALYASDLKASKIGSLLFVKKKNGLHFPSESLCRVINICERVVRTHSRMAIFELVSKQRELYLQQKILCELSGHIDLFVDVNKHLFDGEVCAINHFVKLLKDIIICFLNIRAKNVAQNPLKHHSERTDMKTLSRKHWSPVQDYKCSSFANTSSKFRHLLSNDGYPFK

SEQ ID NO: 12 - protein, 257 aa, Homo sapiens
MPARCVAAHCGNTTKSGKSLFRFPKDRAVRLLWDRFVRGCRADWYGGNDRSVICSDHFAPACFDVSSVIQKNLRFSQRLRLVAGAVPTLHRVPAPAPKRGEEGDQAGRLDTRGELQAARHSEAAPGPVSCTRPRAGKQAAASQITCENELVQTQPHADNPSNTVTSVPTHCEEGPVHKSTQISLKRPRHRSVGIQAKVKAFGKRLCNATTQTEELWSRTSSLFDIYSSDSETDTDWDIKSEQSDLSYMAVQVKEETC

SEQ ID NO: 13 - protein, 314 aa, Homo sapiens
MPGFTCCVPGCYNNSHRDKALHFYTFPKDAELRRLWLKNVSRAGVSGCFSTFQPTTGHRLCSVHFQGGRKTYTVRVPTIFPLRGVNERKVARRPAGAAAARRRQQQQQQQQQQQQQQQQQQQQQQQQQQQQQSSPSASTAQTAQLQPNLVSASAAVLLTLQATVDSSQAPGSVQPAPITPTGEDVKPIDLTVQVEFAAAEGAAAAAAASELQAATAGLEAAECPMGPQLVVVGEEGFPDTGSDHSYSLSSGTTEEELLRKLNEQRDILALMEVKMKEMKGSIRHLRLTEAKLREELREKDRLLAMAVIRKKHGM

SEQ ID NO: 14 - protein, 761 aa, Homo sapiens
MPNFCAAPNCTRKSTQSDLAFFRFPRDPARCQKWVENCRRADLEDKTPDQLNKHYRLCAKHFETSMICRTSPYRTVLRDNAIPTIFDLTSHLNNPHSRHRKRIKELSEDEIRTLKQKKIDETSEQEQKHKETNNSNAQNPSEEEGEGQDEDILPLTLEEKENKEYLKSLFEILILMGKQNIPLDGHEADEIPEGLFTPDNFQALLECRINSGEEVLRKRFETTAVNTLFCSKTQQRQMLEICESCIREETLREVRDSHFFSIITDDVVDIAGEEHLPVLVRFVDESHNLREEFIGFLPYEADAEILAVKFHTMITEKWGLNMEYCRGQAYIVSSGFSSKMKVVASRLLEKYPQAIYTLCSSCALNMWLAKSVPVMGVSVALGTIEEVCSFFHRSPQLLLELDNVISVLFQNSKERGKELKEICHSQWTGRHDAFEILVELLQALVLCLDGINSDTNIRWNNYIAGRAFVLCSAVSDFDFIVTIVVLKNVLSFTRAFGKNLQGQTSDVFFAAGSLTAVLHSLNEVMENIEVYHEFWFEEATNLATKLDIQMKLPGKFRRAHQGNLESQLTSESYYKETLSVPTVEHIIQELKDIFSEQHLKALKCLSLVPSVMGQLKFNTSEEHHADMYRSDLPNPDTLSAELHCWRIKWKHRGKDIELPSTIYEALHLPDIKFFPNVYALLKVLCILPVMKVENERYENGRKRLKAYLRNTLTDQRSSNLALLNINFDIKHDLDLMVDTYIKLYTSKSELPTDNSETVENT

SEQ ID NO: 15 - protein, 38 aa, Artificial Sequence
  Consensus sequence for PAR4 binding domain of THAP
  UNSURE (1)...(38): Xaa = Any Amino Acid
LEXXXXXXXXXXXXXXQRXRRQXRXXXXXXXXXXXQXE

SEQ ID NO: 16 - protein, 73 aa, Sus scrofa
MVQSCSAYGCKNRYDKDKPVSFHKFPLTRPSLCKKWEAAVRRKNFKPTKYSSICSEHFTPDCFKRECNNKLLK

SEQ ID NO: 17 - protein, 99 aa, Sus scrofa
MVKCCSAIGCASRCLPNSKLKGLTFHVFPTDEKVKRKWVLAMKRLDVNAAGMWEPKKGDVLCSRHFKKTDFDRTTPNIKLKPGVIPSIFDSPSHLTGEE

SEQ ID NO: 18 - protein, 103 aa, Sus scrofa
MPRHCSAAGCCTRDTRETRNRGISFHRLPKKDNPRRGLWLANCQRLDPSGQGLWDPASEYIYFCSKHFEENCFELVGISGYHRLKEGAVPTIFESFSKLRRTA

SEQ ID NO: 19 - protein, 99 aa, Sus scrofa
MTRSCSAVGCSTRDTVLSRERGLSFHQFPTDTIQRSQWIRAVNRMDPRSKKIWIPGPGAMLCSKHFQESDFESYGIRRKLKKGAVPSVSLYKVLQGAHL

SEQ ID NO: 20 - protein, 92 aa, Bos taurus
MPKSCAARQCCNRYSNRRKQLTFHRFPFSRPELLKEWVLNIGRGDFEPKQHTVICSEHFRPECFSAFGNRKNLKHNAVPTVFAFQGPPQLVR

SEQ ID NO: 21 - protein, 75 aa, Bos taurus
RLPKKDNPRRGLWLANCQRLDPSGQGLWDPASEYIYFCSKHFEENCFELVGISGYHRLKEGAVPTIFESFSKLRR

SEQ ID NO: 22 - protein, 91 aa, Mus musculus
MVQSCSAYGCKNRYDKDKPVSFHKFPLTRPSLCKQWEAAVKRKNFKPTKYSSICSEHFTPDCFKRECNNKLLKENAVPTIFLYIEPHEKKE

SEQ ID NO: 23 - protein, 90 aa, Mus musculus
MPTNCAAAGCAATYNKHINISFHRFPLDPKRRKEWVRLVRRKNFVPGKHTFLCSKHFEASCFDLTGQTRRLKMDAVPTIFDFCTHIKSLK

SEQ ID NO: 24 - protein, 92 aa, Mus musculus
MPKSCAARQCCNRYSSRRKQLTFHRFPFSRPELLREWVLNIGRADFKPKQHTVICSEHFRPECFSAFGNRKNLKHNAVPTVFAFQNPTEVCP

SEQ ID NO: 25 - protein, 95 aa, Mus musculus
MVICCAAVNCSNRQGKGEKRAVSFHRFPLKDSKRLIQWLKAVQRDNWTPTKYSFLCSEHFTKDSFSKRLEDQHRLLKPTAVPSIFHLSEKKRGAG

SEQ ID NO: 26 - protein, 52 aa, Mus musculus
ILQAFGSLKKGDVLCSRHFKKTDFDRSTLNTKLKAGAIPSIFECPYHLQEKR

SEQ ID NO: 27 - protein, 103 aa, Mus musculus
MPRHCSAAGCCTRDTRETRNRGISFHRLPKKDNPRRGLWLANCQRLDPSGQGLWDPTSEYIYFCSKHFEENCFELVGISGYHRLKEGAVPTIFESFSKLRRTA

SEQ ID NO: 28 - protein, 90 aa, Mus musculus
MPGFTCCVPGCYNNSHRDKALHFYTFPKDAELRRLWLKNVSRAGVSGCFSTFQPTTGHRLCSVHFQGGRKTYTVRVPTIFPLRGVNERKV

SEQ ID NO: 29 - protein, 96 aa, Mus musculus
MPNFCAAPNCTRKSTQSDLAFFRFPRDPARCQKWVENCRRADLEDKTPDQLNKHYRLCAKHFETSMICRTSPYRTVLRDNAIPTIFDLTSHLNNPH

SEQ ID NO: 30 - protein, 24 aa, Rattus norvegicus
MPTNCAAAGCAATYNKHINISFHR

SEQ ID NO: 31 - protein, 85 aa, Rattus norvegicus
RQCCNRYSSRRKQLTFHRFPFSRPELLREWVLNIGRADFKPKQHTVICSEHFRPECFSAFGNRKNLKHNAVPTVFAFQNPAQVCP

SEQ ID NO: 32 - protein, 70 aa, Rattus norvegicus
RFPLKDSKRLIQWLKAVQRDNWTPTKYSFLCSEHFTKDSFSKRLEDQHRLLKPTAVPSIFHLSEKKRGAG

SEQ ID NO: 33 - protein, 55 aa, Rattus norvegicus
MVKCCSAIGCASRCLPNSKLKGLTFHVFPTDENIKRKWVLAMKRLDVNTAGIWEP

SEQ ID NO: 34 - protein, 103 aa, Rattus norvegicus; identical to SEQ ID NO: 27

SEQ ID NO: 35 - protein, 90 aa, Rattus norvegicus; identical to SEQ ID NO: 28

SEQ ID NO: 36 - protein, 96 aa, Rattus norvegicus; identical to SEQ ID NO: 29

SEQ ID NO: 37 - protein, 94 aa, Gallus gallus
MVICCAAANCSNRQGKALRGAVSFHRFPLKDSKRLIQWLKAVQRDNWTPTKYSFLCSEHFTKDSFSRRLEDQHRLLKPTAVPTIFQLAEKKRDN

SEQ ID NO: 38 - protein, 94 aa, Gallus gallus
MPRYCAASYCKNRGGQSARDQRKLSFYPFPLHDKERLEKWLRNMKRDAWTPSKHQLLCSDHFTPDSLDVRWGIRYLKHTAVPTIFSSPDDEEKG

SEQ ID NO: 39 - protein, 102 aa, Gallus gallus
MPRHCSAAGCCTRDTRETRSRGISFHRLPKKDNPRRALWLENSRRRDASGEGRWDPASKYIYFCSQHFEKSCFEIVGFSGYHRLKEGAVPTVFESTSPRPPR

SEQ ID NO: 40 - protein, 27 aa, Gallus gallus
MTRSCSALGCSARDNGRSRERGISFHQ

SEQ ID NO: 41 - protein, 90 aa, Xenopus laevi
MVQSCSAYGCKNRYDKDRPISFHKFPLKRPLLCKKWEAAVRRADFKPTKYSSICSDHFTADCFKRECNNKLLKDNAVPTVFALAEIKKKM

SEQ ID NO: 42 - protein, 103 aa, Xenopus laevi
MPRHCSALGCTTRDSRQTRNNNISFHRLPRKDDPRRNLWIANCQRTDPSGKGLWDPSSDYVYFCSKHFEKSCFEVVGTSGYHRLKEDAVPTLFLSSAKLRRAA

SEQ ID NO: 43 - protein, 90 aa, Xenopus laevi
MVRSCSAANCVNRQTALNKRKGITFHRFPKEQARRQLWITAVTHSHAAVGTDWTPSIHSSLCSQHFNNTQFDRTGQTVRLRDSAVPTVFS

SEQ ID NO: 44 - protein, 99 aa, Xenopus laevi
MPVSCAASGCKSRYTMDAREKGITFHRFPRSNPTLLEKWRLAMRRSTRNGELWMPSRYQRLCSLHFKQCCFDTTGQTKRLREDVIPTIFDFPEETHVIF

SEQ ID NO: 45 - protein, 90 aa, Xenopus laevi
MPACAAINCTSRQTRGCGKSFHKFPHGRPEVLKKWVMNMRRDKFKPSSKAVLCSDHFEEFCFDRTGQTIRLRTDAVPTVFTFPGKMKKDR

SEQ ID NO: 46 - protein, 105 aa, Xenopus laevi
MPHCVVSNCVHFNYKKSNLHGVALHPFPNDLSRIKLWLQQIGLTTDEIDYLAQKVVEGKRKKTDSHRMCSAHFTPNCYIVQDAKLVLRSDAIPTMFPGLSSSTTN

SEQ ID NO: 47 - protein, 104 aa, Xenopus laevi
MPKCIVTKCPHKTGQKELYPSVILHPFPGNIEKIKQWLLQTGEDYGDYEVFAEKVLEAKKTDAYRICSRHFAEDQYVKRGPRKLLSKDAVPTIFSNLHPLIQLH

SEQ ID NO: 48 - protein, 102 aa, Xenopus laevi
MPRCVVKNCPHWTGKKGSQVILHGFPNNSRLIKLWLSQTKQDFGDVEDFTQKILEGKKNDLYRLCSKHFTNDSYEIRGTKRFLKYGAVPTVFEDTPPLKRRK

SEQ ID NO: 49 - protein, 104 aa, Xenopus laevi
MPNCIVKDCRHKSGQKIQNPDVVLHPFPNNINMIKNWLLQTGQDFGDIDVLADKILKGKKTANFRMCSCHFTRDSYMARGSKTTLKPNAIPTIFPVILPTTVPS

SEQ ID NO: 50 - protein, 99 aa, Xenopus laevi
MPKCFVQSCPHYTGRNGKPDNVILHTFPRCKKQVQVWLSRTGERYENMAEFVTYITQRCSNFRMCSEHFTDDCYITVEGKRRLMENSAPTIFKTTFRQN

SEQ ID NO: 51 - protein, 104 aa, Xenopus laevi
MTKCIVKGCRHTTGQKLKFPHIVMHAFPSNLKMIKVWLKQTGQYGNNLEEMALKVLGGKKSDSYRLCSAHFTVDSYALRRSKNMLKKDAFPTLFGQNQINAANV

SEQ ID NO: 52 - protein, 84 aa, Xenopus laevi
MPKCIVIHCPHSCSKKVTKNTGVVMHTFPFNLDRIKNWLLSIDQNFGNIDTLANRILEEKKKHSDLYRLCSEHFTPQCYISTGE

SEQ ID NO: 53 - protein, 104 aa, Xenopus laevi
MPSCIVKGCPHRTGQKDKFPNVTLHNFPKTIPKIKNWLWQTGQYGEDSDAIAEEILQGLKTCRHRMCSMHFSENCFITLGSKRVLTRNAVPTIFKPQTTPAILA

SEQ ID NO: 54 - protein, 104 aa, Xenopus laevi
MPKCILNGCPYRTGQKLKFPDIVLHPFPKSMEMIRNWLFQTGQHAEDVESLSQRIYQGLKTSNFRMCSKHFTQDCYMQVGSRKCLKPNAVPTVFESYNVPVTTF

SEQ ID NO: 55 - protein, 105 aa, Xenopus laevi
NNASCIVRGCHHSTARKCLSPGIALHGFPNNLSRIKQWLVNIGQNVGDIDDFAQKVLDGKKQNSYRICSAHFSSDCFVQFGYSKGLKADAVPTIFAWNTPESRGR

SEQ ID NO: 56 - protein, 107 aa, Xenopus laevi
MPSCIVKGCRHKSGQKVLYPDVVLHSFPNNIHMIKNWLLQTGQVFGDIDAFAEKVLKGNKTSAFRMCSRHFTRDSYMAKGSKITLKPNAVPTIFNTLPPAAAVPSLM

SEQ ID NO: 57 - protein, 91 aa, Danio rerio
MVQSCSAYGCNNRYQKDRIISFHKFPLARPEVCVQWVSAMSRRNFKPTKYSNICSQHFTSDCFKQECNNRVLKDNAVPSLFTLQTQDPFSA

SEQ ID NO: 58 - protein, 103 aa, Danio rerio
MPRHCSAVGCKSRDTKDVRKSGITFHRLPKKGNPRRTTWIINSRRKGPEGKGQWDPQSGFIYFCSKHFTPDSFELSGVSGYHRLKDDAIPTVFEIEPHKKGTA

SEQ ID NO: 59 - protein, 90 aa, Danio rerio
MPGFTCCVPGCYNNSHRDRDLRFYTFPKDPTQREIWLKNISRAGVSGCFSTFQPTTGHRVCSVHFPGGRKTYTIRVPTLFPLRGVNERRS

SEQ ID NO: 60 - protein, 96 aa, Danio rerio
MPNFCAALNCSRNSTHSVLAFFRFPRDPERCKKWVENCSRSDLKDKTPDHLNKYHRLCARHFEPNLITKTSPFRTVLKDSAVPTIFDNPFKRSNNE

SEQ ID NO: 61 - protein, 99 aa, Danio rerio
MPYKCVAYGCGKISGQNVSMFRFPKDPEEFSKWQRQVQKTRRNWLANTYSHLCNEHFTKDCFEPKTYVTAKASGFKRLKLKDGAVPTVFIRRRCRKCGG

SEQ ID NO: 62 - protein, 90 aa, Danio rerio
MGGCSAPNCSNSTTIGKQLFRFPKDPVRMRKWLVNCRRDFVPTPCSRLCQDHFEESQFEEIARSPAGGRKLKPNAIPTLFNVPDPPSPVT

SEQ ID NO: 63 - protein, 105 aa, Danio rerio
MVLNCAYPGCLNLFKKERLRSNSSSHGGKLTFHRFPTLEPGRLLLWRAALGMDPDTPMRSLRVWRICSEHFSPEDFRAVNGNKVLLKASAVPRVYSTPAPGSRAD

SEQ ID NO: 64 - protein, 99 aa, Danio rerio
MASSRRCYCSVPGCSNSKKRHPYLSFHDFPKDEGQRKSWVKFIRREEGPFFQIKRGSTFVCSMHFKADDIYTTISGRRKINPGAAPRLFSWNNWSTDKV

SEQ ID NO: 65 - protein, 66 aa, Danio rerio
FPKENVLRKQWEIALKRKGFSASESSVLCSEHFRPQDLDRTGQTVRVRDGAKPSVFSFPAHMQKHV

SEQ ID NO: 66 - protein, 93 aa, Danio rerio
SSEHCCVPLCGASSRFNSAVSFHTFPVSTEIREKWIKNIRREKLNITYHTRVCCRHFTTDDLIQPRNPIGRRLLRKGAVPTLFKWNGYSDAEA

SEQ ID NO: 67 - protein, 93 aa, Danio rerio
MPDFCAAYGCSNERTKKLKDKGITFHRFPRDVKRRQAWTLALRRDKFEPKPRSLLCSCHFRPEDFDRTGQTVRLRDGVIPSIFNFSNPLSKLS

SEQ ID NO: 68 - protein, 97 aa, Danio rerio
MPVCSAYKCKKRSDREYKEAYKRGEFSFHKFPLEDGLRVREWLRRMRWQNWWPTGNSVLCSDHFEKDCFEQVGSHKRLRKSAVPTIFNFPKHLQWKV

SEQ ID NO: 69 - protein, 90 aa, Danio rerio
MVLVCSAYNCKNTLRNKSVSFHLFPLKDPSLLKKWLKNLRWKDWKPNPNSKICSAHFEEKCFILEGKKTRLHTWAVPTIFSFPNRFSERN

SEQ ID NO: 70 - protein, 107 aa, Danio rerio
MNSISLKYLRRECAYSRYCCVPFCKISSRFNSVISFHKLPLDRATRKMWLHNIRRKTFEVSPHVRVCSRHFTNDDFIEPSYPTARRLLKKGAVPTLFRWNNDSTSGQ

SEQ ID NO: 71 - protein, 89 aa, Danio rerio
LRLRQSASSHEESLTFYSLPLQDFKRLNLWLNAVRRDTKSSIRNIRGLRVCSEHFAQDDFSLNRGSKRRLKSTAVPKCNEALPQIRRAG

SEQ ID NO: 72 - protein, 105 aa, Danio rerio
MVITCACPGCDNRYKTLRLRSDSKFHPGKLTFHKFPTSDPERLKLWLLALGLDINTPLSVLETRRICSDHFSPFDFKDTKGSIVQLKSWAVPMNLSEQFVDDPSK

SEQ ID NO: 73 - protein, 96 aa, Danio rerio
MPDCCAAANCKQSTDQSSVSFFEFPLDPDRCRQWVGRCNRPDLQTKTPEDLHKNYKVCSRHFETSMICQQSAVKCILKDDAVPTLFNFSTNQDNAQ

SEQ ID NO: 74 - protein, 91 aa, Danio rerio
MVKCTVQGCINFSDLRPEEQPNRPRKRFFRFPKDKVLVKVWLAALRDTEREITDLHRICEDHFLSHHITADGISPDAIPIMPPLDGPVGNW

SEQ ID NO: 75 - protein, 84 aa, Danio rerio
MPISCSAVDCSNRFVKGSEIRFYRFPISKPQLAEQWVRSLGRKNFVPTQNSCLCSEHFQPDCFRDYNGKLFLREDAVPTIFSNS

SEQ ID NO: 76 - protein, 95 aa, Oryzias latipes
MPNFCAAPNCTRKSTQSDLAFFRFPRDPERCRIWVENCRRADLEAKTADQLNKHYRLCAKHFDPAMVCKTSPYRTVLKDTAIPTIFDLTSHLKNP

SEQ ID NO: 77 - protein, 90 aa, Oryzias latipes
MPTGCAHANCRNVVGKFRGVTFHKFPRDPEKLSRWTKFMKRHESWVPKYYDRVCSVHFSSEHFDRTGQTVRLRDNAEPSLPHLPWRFPKS

SEQ ID NO: 78 - protein, 94 aa, Oryzias latipes
MQNRCAVLTCPSGKTDFQPMFRFPHDQERSRRWVEKCQGENLIGKSPEQLYRYYRICKRHFETSAFDCDADGAVLKKDAVPTIFDASVPPQSSQ

SEQ ID NO: 79 - protein, 92 aa, Drosophila melanogaster
MPAHCAVINCSHKYVHAGSISFHRFPFKRKDLLQKWKEFTQRSAQWMPSKWSALCSRHFGDEDFNCSNNRKTLKKNAVPSIRVSEDDSMSGH

SEQ ID NO: 80 - protein, 90 aa, Drosophila melanogaster
MPTIRRCCIIGCLSNSRQHPSMQFFAFPRPENPFHKLWKEACHASLRRIVPFKKPVVCALHFDPSVLGGRRLQSNALPTLRLEVPSNLEA

SEQ ID NO: 81 - protein, 104 aa, Drosophila melanogaster
MRCAVPNCRNFSDCRSKRNAAQQQRLGFFRFPKCPDTFKAWLAFCGYTEESLKLKNPCICIEHFKDEDIEGSLKFEMGLAKKRTLRPGAVPCVNKSQESGSDRA

SEQ ID NO: 82 - protein, 96 aa, Drosophila melanogaster
MGGTKCCFRDCPVGSSRNPNMHFFKFPVKDPKRLKDWVRNCSNPDVSNAPPSKLAAKTVCARHFRAECFMNYKMDRLIPMQTPTLFRINRDLALDY

SEQ ID NO: 83 - protein, 96 aa, Drosophila melanogaster
MATRSCAYKDCEYYYVGHENALTKGRTLFAFPKQPQRARIWHENGQVHPKIPHSQLFMCSLHFDRKFISSSKNRTLLVGEAVPFPYEESSSKPEEE

SEQ ID NO: 84 - protein, 87 aa, Drosophila melanogaster
MKYCKFCCKAVTGVKLIHVPKCAIKRKLWEQSLGCSLGENSQICDTHFNDSQWKAAPAKGQTFKRRRLNADAVPSKVIEPEPEKIKE

SEQ ID NO: 85 - protein, 92 aa, Anopheles gambiae
MPASCVIPDCDLKYTHGDDVSFHKFPLKSPELLKQWIQFTGRDEGWHPTKWSALCSRHFVASDFKGCAARKILLPTAVPSVRNAVAAKAQPN

SEQ ID NO: 86 - protein, 108 aa, Anopheles gambiae
MSAVRSCALCQNRSNITDQQTDDALERITYHKFPTNPVRRDRWIEFCDLPKESFPKSAYKFLCSSHFTPECFERDLRGELLYGTKRMTLQKDAMPTIRSVSQQLKRTT

SEQ ID NO: 87 - protein, 100 aa, Anopheles gambiae
MWDCAVIGCPNSRFNAQKTRPRISFHVFPHPVRESNRFRRWLALINNPRLFRLDPLNVFKSVRVCRRHFGPDCFNGVCRNLLPTAIPTLNLPEVRPVALV

SEQ ID NO: 88 - protein, 95 aa, Anopheles gambiae
MGIRKCIVPECPSSSARPEDRGVTYHKIPYLDEMKRLWIVACHLPDDYFATKASNVCSRHFRRADFQEFKGKKYVLKLGVVPTVFPWTVTKPPGE

SEQ ID NO: 89 - protein, 107 aa, Anopheles gambiae
MGKISGSHCLVLGCRNRQLLNQANIRSYFRFPRDADLCKKWVDFCNRPELYKKYDENGPEYLYKSSRICSDHFQPADFNNPNLFSQGLKKGSVPSVNPANLEAAKPH

SEQ ID NO: 90 - protein, 104 aa, Anopheles gambiae
MTNCSCAVADCNNNRRNVRKRMLDIGFHTFPSDPVQRQRWVKFCQREPSWQPKSCDSMCSVHFKDTDYQMSHSPLIRLATNLRRLKPDVIPTIRKGRAIPVAAR

SEQ ID NO: 91 - protein, 95 aa, Anopheles gambiae
MGGCRCTFRDCENGTASRKELHYFRYPVRDQERLIEWAKNADRLEFVDLPVDKVSNKVVCQEHFERKMFMNDLRDRLTKMAIPRLMVMPDETIVN

SEQ ID NO: 92 - protein, 97 aa, Anopheles gambiae
MKCFVSGCDTDDNVVSYTSVFYVNCPTDPTIQQQWFTLLEVTDPDAMRALVDGRSKVCSCHFTEDCFGHHPVYGYRYLLATALPTVFPPRKEIEQPK

SEQ ID NO: 93 - protein, 92 aa, Bombyx mori
MPRCSVIVCKNNSCIVNYKKDSISFHTYPKDPKIKEMWINATGRGPSWFPTKNHTICSSHFEPKCFQPLKKVRRLFEWSVPTLKLRMVLMNY

SEQ ID NO: 94 - protein, 96 aa, Bombyx mori
MPDTHRTCEVCGIKERHLTEKRFFARFPLDVNRCKQWVKMVGKEDLAYLQVHMLHDLKHVCEAHFSRRDFTKSKKRLKKRAVPKLNLTLPPLRDEI

SEQ ID NO: 95 - protein, 89 aa, Caenorhabditis elegans
MPTTCGFPNCKFRSRYRGLEDNRHFYRIPKRPLILRQRWLTAIGRTEETVVSQLRICSAHFEGGEKKEGDIPVPDPTVDKQIKIELPPK

SEQ ID NO: 96 - protein, 100 aa, Caenorhabditis elegans
MYGVQSECVLCAHANDCTAMIPFPGPDDEKLRTKWINSMCREPWIYRYLSTRLEKPGRHYLCASHFNRNSLRYHAGLGLWRRAAACPVLACTTDEERQEV

SEQ ID NO: 97 - protein, 86 aa, Caenorhabditis elegans
MEHPLQCCYCLEVYEKRYMTQVPKTEQRIARWVAILGEQFRIRLRMKPANYMCRKHFPQADFSSRGRLLKTAVPNVVSQEKVLAFK

SEQ ID NO: 98 - protein, 97 aa, Caenorhabditis elegans
NLTHKPCTVCNRVMKSGEMHLNFPADLDRRRIWANLLGFKYKDILRSKMGPVSFSIAAGPICTEHFAEECFRNHNFNKSAIEAFGVPVAISPDVKTT

SEQ ID NO: 99 - protein, 210 aa, Mus musculus
MVQSCSAYGCKNRYDKDKPVSFHKFPLTRPSLCKQWEAAVKRKNFKPTKYSSICSEHFTPDCFKRECNNKLLKENAVPTIFLYIEPHEKKEDLESQEQLPSPSPPASQVDAAIGLLMPPLQTPDNLSVFCDHNYTVEDTMHQRKRILQLEQQVEKLRKKLKTAQQRCRRQERQLEKLKEVVHFQREKDDASERGYVILPNDYFEIVEVPA

SEQ ID NO: 100 - protein, 217 aa, Mus musculus
MPTNCAAAGCAATYNKHINISFHRFPLDPKRRKEWVRLVRRKNFVPGKHTFLCSKHFEASCFDLTGQTRRLKMDAVPTIFDFCTHIKSLKLKSRNLLKTNNSFPPTGPCNLKLNGSQQVLLEHSYAFRNPMEAKKRIIKLEKEIASLRKKMKTCLQRERRATRRWIKATCFVKSLEASNMLPKGISEQILPTALSNLPLEDLKSLEQDQQDKTVPIL

SEQ ID NO: 101 - protein, 218 aa, Mus musculus
MPKSCAARQCCNRYSSRRKQLTFHRFPFSRPELLREWVLNIGRADFKPKQHTVICSEHFRPECFSAFGNRKNLKHNAVPTVFAFQNPTEVCPEVGAGGDSSGRNMDTTLEELQPPTPEGPVQQVLPDREAMEATEAAGLPASPLGLKRPLPGQPSDHSYALSDLDTLKKKLFLTLKENKRLRKRLKAQRLLLRRTCGRLRAYREGQPGPRARRPAQGS

SEQ ID NO: 102 - protein, 205 aa, Mus musculus
MVICCAAVNCSNRQGKGEKRAVSFHRFPLKDSKRLIQWLKAVQRDNWTPTKYSFLCSEHFTKDSFSKRLEDQHRLLKPTAVPSIFHLSEKKRGAGGHGHARRKTTAAMRGHTSAETGKGTIGSSLSSSDNLMAKPESRKLKRASLQDDAAPKVTPGAVSQEQGQSLEKTPGDDPAAPLARGQEEAQASATEADHQKASSSTDAEG

SEQ ID NO: 103 - protein, 186 aa, Mus musculus
ILQAFGSLKKGDVLCSRHFKKTDFDRSTLNTKLKAGAIPSIFECPYHLQEKREKLHCRKNFLLKTLPITHHGRQLVGASCIEEFEPQFIFEHSYSVMDSPKKLKHKLDRVIIELENTKESLRNVLAREKHFQKSLRKTIMELKDESLISQETANSLGAFCWECYHESTAGGCSCEVISYMLHLQLT

SEQ ID NO: 104 - protein, 194 aa, Mus musculus
MPRHCSAAGCCTRDTRETRNRGISFHRLPKKDNPRRGLWLANCQRLDPSGQGLWDPTSEYIYFCSKHFEENCFELVGISGYHRLKEGAVPTIFESFSKLRRTAKTKGHGYPPGLPDVSRLRRCRKRCSERQGPTTPFSPPPRADIICFPVEEASAPATLPASPAVRLDPGLNSPFSDLLGPLGAQADEAGCSTQ

SEQ ID NO: 105 - protein, 305 aa, Mus musculus
MPGFTCCVPGCYNNSHRDKALHFYTFPKDAELRRLWLKNVSRAGVSGCFSTFQPTTGHRLCSVHFQGGRKTYTVRVPTIFPLRGVNERKVARRPAGAAAARRRQQQQQQQQQQQQQQQLQQQQPSPSSSTAQTTQLQPNLVSASAAVLLTLQAAVDSNQAPGSVVPVSTTPSGDDVKPIDLTVQVEFAAAEGAAAAAAASELEAATAGLEAAECTLGPQLVVVGEEGFPDTGSDHSYSLSSGTTEEELLRKLNEQRDILALMEVKMKEMKGSIRHLRLTEAKLREELREKDRLLAMAVIRKKHGM

SEQ ID NO: 106 - protein, 305 aa, Mus musculus; identical to SEQ ID NO: 105

SEQ ID NO: 107 - protein, 652 aa, Mus musculus
MPNFCAAPNCTRKSTQSDLAFFRFPRDPARCQKWVENCRRADLEDKTPDQLNKHYRLCAKHFETSMICRTSPYRTVLRDNAIPTIFDLTSHLNNPHSRHRKRIKELSEDEIRTLKQKKIEETSEQEQETNTNAQNPSAEAVNQQDANVLPLTLEEKENKEYLKSLFEILVLMGKQNIPLDGHEADEVPEGLFAPDNFQALLECRINSGEEVLRKRFEATAVNTLFCSKTQQRHMLEICESCIREETLREVRDSHFFSIITDDVVDIAGEEHLPVLVRFVDDAHNLREEFVGFLPYEADAEILAVKFHTTITEKWGLNMEYCRGQAYIVSSGFSSKMKVVASRLLEKYPQAVYTLCSSCALNAWLAKSVPVIGVSVALGTIEEVCSFFHRSPQLLLELDSVISVLFQNSEERAKELKEICHSQWTGRHDAFEILVDLLQALVLCLDGIINSDTNVRWNNYIAGRAFVLCSAVTDFDFIVTIVVLKNVLSFTRAFGKNLQGQTSDVFFAASSLTAVLHSLNEVMENIEVYHEFWFEEATNLATKLDIQMKLPGKFRRAQQGNLESQLTSESYYKDTLSVPTVEHIIQELKDIFSEQHLKALKCLSLVPSVMGQLKFNTSEEHHADMYRSDLPNPDTLSAELHCWRIKWKHRGKD

SEQ ID NO: 108 - protein, 180 aa, Rattus norvegicus
  UNSURE 95: RAT THAP; Xaa = any of the twenty amino acids
RQCCNRYSSRRKQLTFHRFPFSRPELLREWVLNIGRADFKPKQHTVICSEHFRPECFSAFGNRKNLKHNAVPTVFAFQNPAQVCPEVGAGGDSSXRNMDATLEELQSPNTEGPMQQVLPDRQATEAMEAAGLPAGPLGLKRPLPGQPSDHSYALLDLDTLKKKLFLTLKENKRLRKRLKA

SEQ ID NO: 109 - protein, 82 aa, Rattus norvegicus
MVKCCSAIGCASRCLPNSKLKGLTFHVFPTDENIKRKWVLAMKRLDVNTAGIWEPSLQPESFYFIFMENLFFILPPQLSHAV

SEQ ID NO: 110 - protein, 309 aa, Rattus norvegicus
MPRHCSAAGCCTRDTRETRNRGISFHRLPKKDNPRRGLWLANCQRLDPSGQGLWDPTSEYIYFCSKHFEENCFELVGISGYHRLKEGAVPTIFESFSKLRRTAKTKVHGYPPGLPDVSRLRRCRKRCSERQGPTIPFSPPPRADIIRFPVEEASAPATLPASPAARLDPGLNSPFSDLLGPLGAQADEAGCSAQPSPEQHPSPLEPQHVSPSTYMLRLPPPAGAYIQNEHSYQVGSALLWKRRAEAALDALDKTQRQLQACKRREQRLRLRLTKLQQERAREKRAQADARQTLKDHVQDFAMQLSSSMA

SEQ ID NO: 111 - protein, 142 aa, Rattus norvegicus
MPNFCAAPNCTRKSTQSDLAFFRFPRDPARCQKWVENCRRADLEDKTPDQLNKHYRLCAKHFETSMICRTSPYRTVLRDNAIPTIFDLTSHLNNPHSRHRKRIKELSEDEIRTLKQKKIEETSEQEQGTNSNAQYPSAEVGN

SEQ ID NO: 112 - protein, 104 aa, Sus scrofa
MVKCCSAIGCASRCLPNSKLKGLTFHVFPTDEKVKRKWVLAMKRLDVNAAGMWEPKKGDVLCSRHFKKTDFDRTTPNIKLKPGVIPSIFDSPSHLTGEERKAPL

SEQ ID NO: 113 - protein, 235 aa, Sus scrofa
  UNSURE 57, 124, 192: Xaa = any of the twenty amino acids
MPRHCSAAGCCTRDTRETRNRGISFHRLPKKDNPRRGLWLANCQRLDPSGQGLWDPXSEYIYFCSKHFEENCFELVGISGYHRLKEGAVPTIFESFSKLRRTAKTKGHSYPPGPPDVSRLRRCXKRCSEGRGPTTPFSPPPPADVTCFPVEEASAPAALSASPTGRLEPGLSSPFSDLLGPLGAQADEAGCXTQPSPEREPERQPSPLEPRPVSPSAYMLRLPPPAGAYIQNEHS

SEQ ID NO: 114 - protein, 149 aa, Sus scrofa
MTRSCSAVGCSTRDTVLSRERGLSFHQFPTDTIQRSQWIRAVNRMDPRSKKIWIPGPGAMLCSKHFQESDFESYGIRRKLKKGAVPSVSLYKVLQGAHLKGKARQKILKQPLPDNSQEVATEDHNYSLKGPLTIGAEKLAEVQQMLQVS

SEQ ID NO: 115 - protein, 43 aa, Mus musculus
VLEDVAAAEQGLRELQRGRRQCRERVCALRAAAEQREARCRDG

SEQ ID NO: 116 - protein, 45 aa, Mus musculus
QLEQQVEKLRKKLKTAQQRCRRQERQLEKLKEVVHFQREKDDASE

SEQ ID NO: 117 - protein, 45 aa, Homo sapiens
QLEQQVEKLRKKLKTAQQRCRRQERQLEKLKEVVHFQKEKDDVSE

SEQ ID NO: 118 - protein, 342 aa, Homo sapiens
MATGGYRTSSGLGGSTTDFLEEWKAKREKMRAKQNPPGPAPPGGGSSDAAGKPPAGALGTPAAAAANELNNNLPGGAPAAPAVPGPGGVNCAVGSAMLTRAPPARGPRRSEDEPPAASASAAPPPQRDEEEPDGVPEKGKSSGPSARKGKGQIEKRKLREKRRSTGVVNIPAAECLDEYEDDEAGQKERKREDAITQQNTIQNEAVNLLDPGSSYLLQEPPRTVSGRYKSTTSVSEEDVSSRYSRTDRSGFPRYNRDANVSGTLVSSSTLEKKIEDLEKEVVTERQENLRLVRLMQDKEEMIGKLKEEIDLLNRDLDDIEDENEQLKQENKTLLKVVGQLTR

SEQ ID NO: 119 - protein, 134 aa, Homo sapiens
MAQSLALSLLILVLAFGIPRTQGSDGGAQDCCLKYSQRKIPAKVVRSYRKQEPSLGCSIPAILFLPRKRSQAELCADPKELWVQQLMQHLDKTPSPQKPAQGCRKDRGASKTGKKGKGSKGCKRTERSQTPKGP

SEQ ID NO: 120 - protein, 766 aa, Drosophila melanogaster
MKYCKFCCKAVTGVKLIHVPKCAIKRKLWEQSLGCSLGENSQICDTHFNDSQWKAAPAKGQTFKRRRLNADAVPSKVIEPEPEKIKEGYTSGSTQTESCSLFNENKSLREKIRTLEYEMRRLEQQLRESQQLEESLRKIFTDTQIRILKNGGQRATFNSDDISTAICLHTAGPRAYNHLYKKGFPLPSRTTLYRWLSDVDIKRGCLDVVIDLMDSDGVDDADKLCVLAFDEMKVAAAFEYDSSADIVYEPSDYVQLAIVRGLKKSWKQPVFFDFNTRMDPDTLNNILRKLHRKGYLVVAIVSDLGTGNQKLWTELGISESKTWFSHPADDHLKIFVFSDTPHLIKLVRNHYVDSGLTINGKKLTKKTIQEALHLCNKSDLSILFKINENHINVRSLAKQKVKLATQLFSNTTASSIRRCYSLGYDIENATETADFFKLMNDWFDIFNSKLSTSNCIECSQPYGKQLDIQNDILNRMSEIMRTGILDKPKRLPFQKGIIVNNASLDGLYKYLQENFSMQYILTSRLNQDIVEHFFGSMRSRGGQFDHPTPLQFKYRLRKYIIARNTEMLRNSGNIEEGMTNLKECVNKNVIPDNSESWLNLDFSSKENENKSKDDEPVDDEPVDEMLSNIDFTEMDELTEDAMEYIAGYVIKKLRISDKVKENLTFTYVDEVSHGGLIKPSEKFQEKLKELECIFLHYTNNNNFEITNNVKEKLILAARNVDVDKQVKSFYFKIRIYFRIKYFNKKIEIKNQKQKLIGNSKLLKIKL

SEQ ID NO: 121 - protein, 103 aa, Homo sapiens
DELCVVCGDKATGYHYRCITCEGCKGFFRRTIQKNLHPSYSCKYEGKCVIDKVTRNQCQECRFKKCIYVGMATDLVLDDSKRLAKRKLIEENREKRRREELEK

SEQ ID NO: 122 - protein, 81 aa, Homo sapiens
MKPARPCLVCSDEASGCHYGVLTCGSCKVFFKRAVEGQHNYLCAGRNDCIIDKIRRKNCPACRYRKCLQAGMNLEARKTKK

SEQ ID NO: 123 - protein, 89 aa, Homo sapiens
MVQSCSAYGCKNRYDKDKPVSFHKFPLTRPSLCKEWEAAVRRKNFKPTKYSSICSEHFTPDCFKRECNNKLLKENAVPTIFLCTEPHDK

SEQ ID NO: 124 - protein, 85 aa, Drosophila melanogaster
MKYCKFCCKAVTGVKLIHVPKCAIKRKLWEQSLGCSLGENSQICDTHFNDSQWKAAPAKGQTFKRRRLNADAVPSKVIEPEPEKI

SEQ ID NO: 125 - protein, 58 aa, Artificial Sequence
  THAP Domain consensus
  UNSURE 2-3, 7, 9, 13-17, 19, 21-23,  25-26, 28, 35, 38-39, 41, 45-50,52, 55-56: Xaa = any of the twenty amino acids
MVXXCSXYXCKNXXXXXKXVXXXKXXLXRPSLCKXWEXXVXRKNXXXXXXSXICXXHF

SEQ ID NO: 126 - protein, 89 aa, Homo sapiens; identical to SEQ ID NO: 123

SEQ ID NO: 127 - protein, 89 aa, Homo sapiens
MPKSCAARQCCNRYSSRRKQLTFHRFPFSRPELLKEWVLNIGRGNFKPKQHTVICSEHFRPECFSAFGNRKNLKHNAVPTVFAFQDPTQ

SEQ ID NO: 128 - protein, 90 aa, Homo sapiens
MPRYCAAICCKNRRGRNNKDRKLSFYPFPLHDKERLEKWLKNMKRDSWVPSKYQFLCSDHFTPDSLDIRWGIRYLKQTAVPTIFSLPEDN

SEQ ID NO: 129 - protein, 92 aa, Homo sapiens
MPKYCRAPNCSNTAGRLGADNRPVSFYKFPLKDGPRLQAWLQHMGCEHWVPSCHQHLCSEHFTPSCFQWRWGVRYLRPDAVPSIFSRGPPAK

SEQ ID NO: 130 - protein, 90 aa, Homo sapiens
MVICCAAVNCSNRQGKGEKRAVSFHRFPLKDSKRLIQWLKAVQRDNWTPTKYSFLCSEHFTKDSFSKRLEDQHRLLKPTAVPSIFHLTEK

SEQ ID NO: 131 - protein, 89 aa, Homo sapiens
MPTNCAAAGCATTYNKHINISFHRFPLDPKRRKEWVRLVRRKNFVPGKHTFLCSKHFEASCFDLTGQTRRLKMDAVPTIFDFCTHIKSM

SEQ ID NO: 132 - protein, 90 aa, Homo sapiens
MPNFCAAPNCTRKSTQSDLAFFRFPRDPARCQKWVENCRRADLEDKTPDQLNKHYRLCAKHFETSMICRTSPYRTVLRDNAIPTIFDLTS

SEQ ID NO: 133 - protein, 97 aa, Homo sapiens
MPRHCSAAGCCTRDTRETRNRGISFHRLPKKDNPRRGLWLANCQRLDPSGQGLWDPASEYIYFCSKHFEEDCFELVGISGYHRLKEGAVPTIFESFS

SEQ ID NO: 134 - protein, 92 aa, Homo sapiens
MTRSCSAVGCSTRDTVLSRERGLSFHQFPTDTIQRSKWIRAVNRVDPRSKKIWIPGPGAILCSKHFQESDFESYGIRRKLKKGAVPSVSLYK

SEQ ID NO: 135 - protein, 96 aa, Homo sappiens
MVKCCSAIGCASRCLPNSKLKGLTFHVFPTDENIKRKWVLAMKRLDVNAAGIWEPKKGDVLCSRHFKKTDFDRSAPNIKLKPGVIPSIFDSPYHLQ

SEQ ID NO: 136 - protein, 90 aa, Homo sapiens; identical to SEQ ID NO: 28

SEQ ID NO: 137 - protein, 90 aa, Homo sapiens
MPARCVAAHCGNTTKSGKSLFRFPKDRAVRLLWDRFVRGCRADWYGGNDRSVICSDHFAPACFDVSSVIQKNLRFSQRLRLVAGAVPTLH

SEQ ID NO: 138 - protein, 85 aa, Drosophila melanogaster; identical to SEQ ID NO: 124

SEQ ID NO: 139 - protein, 63 aa, Artificial Sequence
  THAP Domain consensus
  UNSURE 4-5, 7, 9-10, 12, 15-20, 22, 24, 32, 35, 38-39, 42-43, 46-47,49-51, 53-61, 63: Xaa = any of the twenty amino acids
MPKXXCXAXXCXNRXXXXXXKXKXVSFHKFPXHDXHDXXRRXXWVXXVXXXRXXXXXXXXXWX

SEQ ID NO: 140 - DNA, 17 bp, Artificial Sequence
  DR-5-related sequence
gggcatactactggcaa

SEQ ID NO: 141 - DNA, 17 bp, Artificial Sequence
  DR-5-related sequence
gggcaaactgtgggcat

SEQ ID NO: 142 - DNA, 17 bp, Artificial Sequence
  DR-5-related sequence
gggcatactactggcaa

SEQ ID NO: 143 - DNA, 17 bp, Artificial Sequence
  DR-5-related sequence
gggcaaactactggcaa

SEQ ID NO: 144 - DNA, 17 bp, Artificial Sequence
  DR-5-related sequence
gggccagttcgttgcaa

SEQ ID NO: 145 - DNA, 16 bp, Artificial Sequence
  DR-5-related sequence
gggcatgtactggcaa

SEQ ID NO: 146 - DNA, 16 bp, Artificial Sequence
  DR-5-related sequence
gggcaactgtgggcaa

SEQ ID NO: 147 - DNA, 18 bp, Artificial Sequence
  DR-5-related sequence
gggcaacactactggcaa

SEQ ID NO: 148 - DNA, 17 bp, Artificial Sequence
  DR-5-related sequence
gggcaaagtactggcaa

SEQ ID NO: 149 - DNA, 17 bp, Artificial Sequence
  DR-5 consensus sequence
  unsure 7-11: n = any of the four nucleotides
gggcaannnnntggcaa

SEQ ID NO: 150 - DNA, 23 bp, Artificial Sequence
  ER-11-related sequence
ttgccagtactaagtgtgggcaa

SEQ ID NO: 151 - DNA, 23 bp, Artificial Sequence
  ER-11-related sequence
ctgccagtacatagtgtgggcaa

SEQ ID NO: 152 - DNA, 23 bp, Artificial Sequence
  ER-11-related sequence
ttgccagtactaagtgtgggcaa

SEQ ID NO: 153 - DNA, 23 bp, Artificial Sequence
  ER-11-related sequence
ctgccagtagatactgtgggcaa

SEQ ID NO: 154 - DNA, 24 bp, Artificial Sequence
  ER-11-related sequence
ttgccagtagttaggtgtgggcga

SEQ ID NO: 155 - DNA, 23 bp, Artificial Sequence
  ER-11-related sequence
ttgccagtagttagtgtgggcaa

SEQ ID NO: 156 - DNA, 23 bp, Artificial Sequence
  ER-11-related sequence
ttgccagtacctactaagggcaa

SEQ ID NO: 157 - DNA, 23 bp, Artificial Sequence
  ER-11-related sequence
ttgccagtagttagtgtgggcag

SEQ ID NO: 158 - DNA, 23 bp, Artificial Sequence
  ER-11-related sequence
ctgccagtagtaagtgtgggcag

SEQ ID NO: 159 - DNA, 23 bp, Artificial Sequence
  ER-11 consensus sequence
  unsure 7-17: n = any of the four nucleotides
ttgccannnnnnnnnnngggcaa

SEQ ID NO: 160 - DNA, 642 bp, Homo sapiens
atggtgcagtcctgctccgcctacggctgcaagaaccgctacgacaaggacaagcccgtttctttccacaagtttcctcttactcgacccagtctttgtaaagaatgggaggcagctgtcagaagaaaaaactttaaacccaccaagtatagcagtatttgttcagagcactttactccagactgctttaagagagagtgcaacaacaagttactgaaagagaatgctgtgcccacaatatttctttgtactgagccacatgacaagaaagaagatcttctggagccacaggaacagcttcccccacctcctttaccgcctcctgtttcccaggttgatgctgctattggattactaatgccgcctcttcagacccctgttaatctctcagttttctgtgaccacaactatactgtggaggatacaatgcaccagcggaaaaggattcatcagctagaacagcaagttgaaaaactcagaaagaagctcaagaccgcacagcagcgatgcagaaggcaagaacggcagcttgaaaaattaaaggaggttgttcacttccagaaagagaaagacgacgtatcagaaagaggttatgtgattctaccaaatgactactttgaaatagttgaagtaccagcataa

SEQ ID NO: 161 - DNA, 687 bp, Homo sapiens
atgccgaccaattgcgctgcggcgggctgtgccactacctacaacaagcacattaacatcagcttccacaggtttcctttggatcctaaaagaagaaaagaatgggttcgcctggttaggcgcaaaaattttgtgccaggaaaacacacttttctttgttcaaagcactttgaagcctcctgttttgacctaacaggacaaactcgacgacttaaaatggatgctgttccaaccatttttgatttttgtacccatataaagtctatgaaactcaagtcaaggaatcttttgaagaaaaacaacagttgttctccagctggaccatctaatttaaaatcaaacattagtagtcagcaagtactacttgaacacagctatgcctttaggaatcctatggaggcaaaaaagaggatcattaaactggaaaaagaaatagcaagcttaagaagaaaaatgaaaacttgcctacaaaaggaacgcagagcaactcgaagatggatcaaagccacgtgtttggtaaagaatttagaagcaaatagtgtattacctaaaggtacatcagaacacatgttaccaactgccttaagcagtcttcctttggaagattttaagatccttgaacaagatcaacaagataaaacactgctaagtctaaatctaaaacagaccaagagtaccttcatttaa

SEQ ID NO: 162 - DNA, 720 bp, Homo sapiens
atgccgaagtcgtgcgcggcccggcagtgctgcaaccgctacagcagccgcaggaagcagctcaccttccaccggtttccgttcagccgcccggagctgctgaaggaatgggtgctgaacatcggccggggcaacttcaagcccaagcagcacacggtcatctgctccgagcacttccggccagagtgcttcagcgcctttggaaaccgcaagaacctaaagcacaatgccgtgcccacggtgttcgcctttcaggaccccacacagcaggtgagggagaacacagaccctgccagtgagagaggaaatgccagctcttctcagaaagaaaaggtcctccctgaggcgggggccggagaggacagtcctgggagaaacatggacactgcacttgaagagcttcagttgcccccaaatgccgaaggccacgtaaaacaggtctcgccacggaggccgcaagcaacagaggctgttggccggccgactggccctgcaggcctgagaaggacccccaacaagcagccatctgatcacagctatgcccttttggacttagattccctgaagaaaaaactcttcctcactctgaaggaaaatgaaaagctccggaagcgcttgcaggcccagaggctggtgatgcgaaggatgtccagccgcctccgtgcttgcaaagggcaccagggactccaggccagacttgggccagagcagcagagctga

SEQ ID NO: 163 - DNA, 1734 bp, Homo sapiens
atggtgatctgctgtgcggccgtgaactgctccaaccggcagggaaagggcgagaagcgcgccgtctccttccacaggttccccctaaaggactcaaaacgtctaatccaatggttaaaagctgttcagagggataactggactcccactaagtattcatttctctgtagtgagcatttcaccaaagacagcttctccaagaggctggaggaccagcatcgcctgctgaagcccacggccgtgccatccatcttccacctgaccgagaagaagaggggggctggaggccatggccgcacccggagaaaagatgccagcaaggccacagggggtgtgaggggacactcgagtgccgccaccggcagaggagctgcaggttggtcaccgtcctcgagtggaaacccgatggccaagccagagtcccgcaggttgaagcaagctgctctgcaaggtgaagccacacccagggcggcccaggaggccgccagccaggagcaggcccagcaagctctggaacggactccaggagatggactggccaccatggtggcaggcagtcagggaaaagcagaagcgtctgccacagatgctggcgatgagagcgccacttcctccatcgaagggggcgtgacagataagagtggcatttctatggatgactttacgcccccaggatctggggcgtgcaaatttatcggctcacttcattcgtacagtttctcctctaagcacacccgagaaaggccatctgtcccccgagagcccattgaccgcaagaggctgaagaaagatgtggaaccaagctgcagtgggagcagcctgggacccgacaagggcctggcccagagccctcccagctcatcacttaccgcgacaccgcagaagccttcccagagcccctctgcccctcctgccgacgtcaccccaaagccagccacggaagccgtgcagagcgagcacagcgacgccagccccatgtccatcaacgaggtcatcctgtcggcgtcaggggcctgcaagctcatcgactcactgcactcctactgcttctcctcccggcagaacaagagccaggtgtgctgcctgcgggagcaggtggagaagaagaacggcgagctgaagagcctgcggcagagggtcagccgctccgacagccaggtgcggaagctacaggagaagctggatgagctgaggagagtgagcgtcccctatccaagtagcctgctgtcgcccagccgcgagccccccaagatgaacccagtggtggagccactgtcctggatgctgggcacctggctgtcggacccacctggagccgggacctaccccacactgcagcccttccagtacctggaggaggttcacatctcccacgtgggccagcccatgctgaacttctcgttcaactccttccacccggacacgcgcaagccgatgcacagagagtgtggcttcattcgcctcaagcccgacaccaacaaggtggcctttgtcagcgcccagaacacaggcgtggtggaagtggaggagggcgaggtgaacgggcaggagctgtgcatcgcatcccactccatcgccaggatctccttcgccaaggagccccacgtagagcagatcacccggaagttcaggctgaattctgaaggcaaacttgagcagacggtctccatggcaaccacgacacagccaatgactcagcatcttcacgtcacctacaagaaggtgaccccgtaa

SEQ ID NO: 164 - DNA, 1188 bp, Homo sapiens
atgccccgctattgcgcagcgatttgttgtaagaaccgccggggacgaaacaataaagaccggaagctgagtttttatccatttcctctacatgacaaagaaagactggaaaagtggttaaagaatatgaagcgagattcatgggttcccagtaaataccagtttctatgtagtgaccattttactcctgactctcttgacatcagatggggtattcgatatttaaaacaaactgcagttccaacaatattttctttgcctgaagacaatcagggaaaagacccttctaaaaaaaaatcccagaagaaaaacttggaagatgagaaagaagtatgcccaaaagccaagtcagaagaatcatttgtattaaatgagacaaagaaaaatatagttaacacagatgtgccccatcaacatccagaattacttcattcatcttccttggtaaagccaccagctcccaaaacaggaagtatacaaaataacatgttaactcttaatctagttaaacaacatactgggaaaccagaatctaccttggaaacatcagttaaccaagatacaggtagaggtggttttcacacatgttttgagaatctaaattctacaactattactttgacaacttcaaattcagaaagtattcatcaatctttggaaactcaagaagttcttgaagtaactaccagtcatcttgctaatccaaactttacaagtaattccatggaaataaagtcagcacaggaaaatccattcttattcagcacaattaatcaaacagttgaagaattaaacacaaataaagaatctgttattgccatttttgtacctgctgaaaattctaaaccctcagttaattcttttatatctgcacaaaaagaaaccacggaaatggaagacacagacattgaagactccttgtataaggatgtagactatgggacagaagttttacaaatcgaacattcttactgcagacaagatataaataaggaacatctttggcagaaagtctctaagctacattcaaagataactcttctagagttaaaagagcaacaaactctaggtagattgaagtctttggaagctcttataaggcagctaaagcaggaaaactggctatctgaagaaaacgtcaagattatagaaaaccattttacaacatatgaagtcactatgatatag

SEQ ID NO: 165 - DNA, 669 bp, Homo sapiens
atggtgaaatgctgctccgccattggatgtgcttctcgctgcttgccaaattcgaagttaaaaggactgacatttcacgtattccccacagatgaaaacatcaaaaggaaatgggtattagcaatgaaaagacttgatgtgaatgcagccggcatttgggagcctaaaaaaggagatgtgttgtgttcgaggcactttaagaagacagattttgacagaagtgctccaaatattaaactgaaacctggagtcataccttctatctttgattctccatatcacctacaggggaaaagagaaaaacttcattgtagaaaaaacttcaccctcaaaaccgttccagccactaactacaatcaccatcttgttggtgcttcctcatgtattgaagaattccaatcccagttcatttttgaacatagctacagtgtaatggacagtccaaagaaacttaagcataaattagatcatgtgatcggcgagctagaggatacaaaggaaagtctacggaatgttttagaccgagaaaaacgttttcagaaatcattgaggaagacaatcagggaattaaaggatgaatgtctgatcagccaagaaacagcaaatagactggacactttctgttgggactgttgtcaggagagcatagaacaggactatatttcatga

SEQ ID NO: 166 - DNA, 930 bp, Homo sapiens
atgccgcgtcactgctccgccgccggctgctgcacacgggacacgcgcgagacgcgcaaccgcggcatctccttccacagacttcccaagaaggacaacccgaggcgaggcttgtggctggccaactgccagcggctggaccccagcggccagggcctgtgggacccggcatccgagtacatctacttctgctccaaacactttgaggaggactgctttgagctggtgggaatcagtggatatcacaggctaaaggagggggcagtccccaccatatttgagtctttctccaagttgcgccggacaaccaagaccaaaggacacagttacccacctggcccccctgaagtcagccggctcagacgatgcaggaagcgctgctccgagggccgagggcccacaactccattttctccacctccacctgctgatgtcacctgctttcctgtggaagaggcctcagcacctgccactttgccggcctccccagctgggaggctggagcctggccttagcagccccttttcagacctactgggccccttgggtgcccaggcagatgaagcaggctgcagcgcccagccttcaccagagcggcagccctcccctctcgaaccacggccagtctccccctcagcgtatatgctgcgcctgcccccacccgccggagcctacatccagaatgaacacagctaccaggtgggcagcgccttactctggaagcggcgagccgaggcagcccttgatgcccttgacaaggcccagcgccagctgcaggcctgcaagcggcgggagcagcggctgcggttgagactgaccaagctgcagcaggagcgggcacgggagaagcgggcacaggcagatgcccgccagactctgaaggagcatgtgcaggactttgccatgcagctgagcagcagcatggcctga

SEQ ID NO: 167 - DNA, 825 bp, Homo sapiens
atgcccaagtactgcagggcgccgaactgctccaacactgcgggccgcctgggtgcagacaaccgccctgtgagcttctacaagttcccactgaaggatggtccccggctgcaggcctggctgcagcacatgggctgtgagcactgggtgcccagctgccaccagcacttgtgcagcgagcacttcacaccctcctgcttccagtggcgctggggtgtgcgctacctgcggcctgatgcagtgccctccatcttctcccggggaccacctgccaagagtcagcggaggacccgaagcacccagaagccagtctcgccgccgcctcccctacagaagaatacacccctgccccagagccctgccatcccagtctctggcccagtgcgcctagtggtgctgggccccacatcggggagccccaagactgtggccaccatgctcctgacccccctggcccctgcgccaactcctgagcggtcacaacctgaagtccctgcccaacaggcccagaccgggctgggcccagtgctgggagcactgcaacgccgggtgcggaggctgcaacggtgccaggagcggcaccaggcgcagctgcaggccctggaacggctggcacagcagctacacggggagagcctgctggcacgggcacgccggggtctgcagcgcctgacaacagcccagacccttggacctgaggaatcccaaaccttcaccatcatctgtggagggcctgacatagccatggtccttgcccaggaccctgcacctgccacagtggatgccaagccggagctcctggacactcggatccccagtgcataa

SEQ ID NO: 168 - DNA, 3171 bp, Homo sapiens
atgacccgaagttgctccgcagtgggctgcagcacccgtgacaccgtgctcagccgggagcgcggcctctccttccaccaatttccaactgataccatacagcgctcaaaatggatcagggctgttaatcgtgtggaccccagaagcaaaaagatttggattccaggaccaggtgctatactgtgttccaaacattttcaagaaagtgactttgagtcatatggcataagaagaaagctgaaaaaaggagctgtgccttctgtttctctatacaagattcctcaaggtgtacatcttaaaggtaaagcaagacaaaaaatcctaaaacaacctcttccagacaattctcaagaagttgctactgaggaccataactatagtttaaagacacctttgacgataggtgcagagaaactggctgaggtgcaacaaatgttacaagtgtccaaaaaaagacttatctccgtaaagaactacaggatgatcaagaagagaaagggtttacgattaattgatgcacttgtagaagagaaactactttctgaagaaacagagtgtctgctacgagctcaattttcagattttaagtgggagttatataattggagagaaacagatgagtactccgcagaaatgaaacaatttgcatgtacactctacttgtgcagtagcaaagtctatgattatgtaagaaagattcttaagctgcctcattcttccatcctcagaacgtggttatccaaatgccaacccagtccaggtttcaacagcaacattttttcttttcttcaacgaagagtagagaatggagatcagctctatcaatactgttcattgttaataaaaagtatacctctcaagcaacagcttcagtgggatcctagcagtcacagtttgcaggggtttatggactttggtcttggaaaacttgatgctgatgaaacgccacttgcttcagaaactgttttgttaatggcagtgggtatttttggccattggagaacacctcttggttatttttttgtaaacagagcatctggatatttgcaggctcagctgcttcgtctgactattggtaaactgagtgacataggaatcacagttctggctgttacatctgatgccacagcacatagtgttcagatggcaaaagcattggggatacatattgatggagacgacatgaaatgtacatttcagcatccttcatcttctagtcaacagattgcatacttctttgactcttgccacttgctaagattaataagaaatgcatttcagaattttcaaagcattcagtttattaatggtatagcacattggcagcacctcgtggagttagtagcactggaggaacaggaattatcaaatatggaaagaataccaagtacacttgcaaatttgaaaaatcatgtactgaaagtgaatagtgccacccaactctttagtgagagtgtagccagtgcattagaatatttgttatccttagacctgccaccttttcaaaactgtattggtaccatccattttttacgtttaattaacaatctgtttgacatctttaatagtaggaactgttatggaaagggacttaaagggcctctgttgcctgaaacttacagtaaaataaaccacgtgttaattgaagccaagactatttttgttacattatctgacactagcaataatcaaataattaaaggtaagcaaaaactaggattcctgggatttttgctcaatgctgagagcttaaaatggctctaccaaaattatgttttcccaaaggtcatgccttttccttatcttctgacttacaaattcagtcatgatcatctggaattatttctaaagatgcttaggcaggtattagtaacaagttctagccctacctgcatggcattccagaaagcttactataatttggagaccagatacaaatttcaagatgaagtttttctaagcaaagtaagcatctttgacatttcaattgctcgaaggaaagacttggcgctttggacagttcaacgtcagtatggtgtcagcgttacaaagactgtctttcacgaagagggtatttgtcaagactggtctcattgttcactaagtgaggcattactagacctgtcagatcataggcgaaatctcatctgttatgctggttatgttgcaaacaagttatcagctcttttaacttgtgaggactgcatcactgcactgtatgcatcggatctcaaagcctctaaaattgggtcactattatttgttaaaaagaagaatggtttgcattttccttcagaaagtctgtgtcgggtcataaatatttgtgagcgagttgtaagaacccattcaagaatggcaatttttgaactagtttctaaacaaagggaattgtatcttcaacagaaaatattatgtgagctttctgggcatattgatctttttgtagatgtgaataagcatctctttgatggagaagtgtgtgccatcaatcactttgtcaagttgctaaaggatataataatctgtttcttaaatatcagagctaaaaatgttgcacagaatcctttaaaacatcattcagagagaactgatatgaaaactttatcaaggaaacactggtcacctgtacaggattataaatgttcaagttttgctaataccagtagtaaattcaggcatttgctaagtaacgatggatatccattcaaatgagagacctaaaatatattaacattttaattaagaatacttgatcaacattttttgaagttcaatttaccatattttataaattgcgcattctgcacagtggacaagtttgcaattctgacttattaaaatttcaaattctgcatatcacaaaatctccttatacttttggtatggcttgcagcatttatgagttttccaaaatatagaaagcagtaggtcagtaggagcaaactagccaacaggtactgtctttgaatttactactgtaagactaagcagtgttactggacacagttttaacttgttcaatctgcttcaaaaacaagaaaaacaacaactatgagttatcaaaatattgactccatttatgactagactacatttctgaaagatctttggtttacgattcttaagaatattgacaatacctataaaactttgaagataacttttacttaa

SEQ ID NO: 169 - DNA, 774 bp, Homo sapiens
atgccggcccgttgtgtggccgcccactgcggcaacaccaccaagtctgggaagtcgctgttccgctttcccaaggaccgggccgtgcggctgctctgggaccgcttcgtgcggggttgccgcgccgactggtacggaggcaatgaccgctcggtcatctgctctgaccactttgccccagcctgttttgacgtctcttcggttatccagaagaacctgcgcttctcccagcgcctgaggctggtggcaggcgccgtgcccaccctgcaccgggtgcccgccccggcacctaagaggggagaggagggagaccaagcaggccgcctggacacgcgaggagagctccaggcagccaggcattctgaggctgccccaggtccagtctcctgtacacgcccccgagctgggaagcaggctgcagcttcacagattacgtgtgaaaatgaacttgtgcaaacccaaccccatgctgataatccatctaatactgtcacttcagtacctactcactgtgaagaaggcccagtgcataaaagtacacaaatttctttgaaaaggccccgtcaccgtagtgtgggtattcaagccaaagtgaaagcgtttggaaaaagactgtgtaatgcaactactcagacagaggaattgtggtctagaacttcctctctctttgacatttactccagtgattcagaaacagatacagactgggatatcaagagtgaacagagtgatttgtcttatatggctgtacaggtgaaagaagaaacatgttaa

SEQ ID NO: 170 - DNA, 945 bp, Homo sapiens
atgcctggctttacgtgctgcgtgccaggctgctacaacaactcgcaccgggacaaggcgctgcacttctacacgtttccaaaggacgctgagttgcggcgcctctggctcaagaacgtgtcgcgtgccggcgtcagtgggtgcttctccaccttccagcccaccacaggccaccgtctctgcagcgttcacttccagggcggccgcaagacctacacggtacgcgtccccaccatcttcccgctgcgcggcgtcaatgagcgcaaagtagcgcgcagacccgctggggccgcggccgcccgccgcaggcagcagcagcaacagcagcagcagcagcaacagcagcaacagcagcagcagcagcaacagcagcagcagcagcagcagcagcagcagtcctcaccctctgcctccactgcccagactgcccagctgcagccgaacctggtatctgcttccgcggccgtgcttctcacccttcaggccactgtagacagcagtcaggctccgggatccgtacagccggcgcccatcactcccactggagaagacgtgaagcccatcgatctcacagtgcaagtggagtttgcagccgcagagggcgcagccgctgcggccgccgcgtcggagttacaggctgctaccgcagggctggaggctgccgagtgccctatgggcccccagttggtggtggtaggggaagagggcttccctgatactggctccgaccattcgtactccttgtcgtcaggcaccacggaggaggagctcctgcgcaagctgaatgagcagcgggacatcctggctctgatggaagtgaagatgaaagagatgaaaggcagcattcgccacctgcgtctcactgaggccaagctgcgcgaagaactgcgtgagaaggatcggctgcttgccatggctgtcatccgcaagaagcacggaatgtga

SEQ ID NO: 171 - DNA, 2286 bp, Homo sapiens
atgccgaacttctgcgctgcccccaactgcacgcggaagagcacgcagtccgacttggccttcttcaggttcccgcgggaccctgccagatgccagaagtgggtggagaactgtaggagagcagacttagaagataaaacacctgatcagctaaataaacattatcgattatgtgccaaacattttgagacctctatgatctgtagaactagtccttataggacagttcttcgagataatgcaataccaacaatatttgatcttaccagtcatttgaacaacccacatagtagacacagaaaacgaataaaagaactgagtgaagatgaaatcaggacactgaaacagaaaaaaattgatgaaacttctgagcaggaacaaaaacataaagaaaccaacaatagcaatgctcagaaccccagcgaagaagagggtgaagggcaagatgaggacattttacctctaacccttgaagagaaggaaaacaaagaatacctaaaatctctatttgaaatcttgattctgatgggaaagcaaaacatacctctggatggacatgaggctgatgaaatcccagaaggtctctttactccagataactttcaggcactgctggagtgtcggataaattctggtgaagaggttctgagaaagcggtttgagacaacagcagttaacacgttgttttgttcaaaaacacagcagaggcagatgctagagatctgtgagagctgtattcgagaagaaactctcagggaagtgagagactcacacttcttttccattatcactgacgatgtagtggacatagcaggggaagagcacctacctgtgttggtgaggtttgttgatgaatctcataacctaagagaggaatttataggcttcctgccttatgaagccgatgcagaaattttggctgtgaaatttcacactatgataactgagaagtggggattaaatatggagtattgtcgtggccaggcttacattgtctctagtggattttcttccaaaatgaaagttgttgcttctagacttttagagaaatatccccaagctatctacacactctgctcttcctgtgccttaaatatgtggttggcaaaatcagtacctgttatgggagtatctgttgcattaggaacaattgaggaagtttgttcttttttccatcgatcaccacaactgcttttagaacttgacaacgtaatttctgttctttttcagaacagtaaagaaaggggtaaagaactgaaggaaatctgccattctcagtggacaggcaggcatgatgcttttgaaattttagtggaactcctgcaagcacttgttttatgtttagatggtataaatagtgacacaaatattagatggaataactatatagctggccgagcatttgtactctgcagtgcagtgtcagattttgatttcattgttactattgttgttcttaaaaatgtcctatcttttacaagagcctttgggaaaaacctccaggggcaaacctctgatgtcttctttgcggccggtagcttgactgcagtactgcattcactcaacgaagtgatggaaaatattgaagtttatcatgaattttggtttgaggaagccacaaatttggcaaccaaacttgatattcaaatgaaactccctgggaaattccgcagagctcaccagggtaacttggaatctcagctaacctctgagagttactataaagaaaccctaagtgtcccaacagtggagcacattattcaggaacttaaagatatattctcagaacagcacctcaaagctcttaaatgcttatctctggtaccctcagtcatgggacaactcaaattcaatacgtcggaggaacaccatgctgacatgtatagaagtgacttacccaatcctgacacgctgtcagctgagcttcattgttggagaatcaaatggaaacacagggggaaagatatagagcttccgtccaccatctatgaagccctccacctgcctgacatcaagttttttcctaatgtgtatgcattgctgaaggtcctgtgtattcttcctgtgatgaaggttgagaatgagcggtatgaaaatggacgaaagcgtcttaaagcatatttgaggaacactttgacagaccaaaggtcaagtaacttggctttgcttaacataaattttgatataaaacacgacctggatttaatggtggacacatatattaaactctatacaagtaagtcagagcttcctacagataattccgaaactgtggaaaatacctaa

SEQ ID NO: 172 - DNA, 633 bp, Mus musculus
atggtgcagtcctgctccgcctacggctgcaagaaccgctacgacaaggacaagcccgtctccttccacaagtttcctcttactcgccccagcctttgtaagcagtgggaggcagctgttaaaaggaaaaacttcaagcccaccaagtacagcagcatctgctcggagcacttcaccccggactgctttaagagggagtgcaacaacaagctactgaaggagaacgctgtgcccacaatatttctctatatcgagccacatgagaagaaggaagacctggaatcccaagaacagctcccctctccttcaccccccgcttcccaggttgatgctgctattgggctgctaatgccccctctgcagacccctgataacctgtcggttttctgtgaccacaattacactgtggaggatacgatgcaccagaggaagaggatcctgcagctggagcagcaggtggagaaactcaggaagaagctcaagacggcccagcagcggtgccggcggcaggagaggcagctcgagaagctcaaggaagtcgtccactttcagagagagaaggacgacgcgtccgagaggggctacgtgatcctaccaaatgactactttgaaattgttgaagttccagcatga

SEQ ID NO: 173 - DNA, 654 bp, Mus musculus
atgccgaccaattgcgccgcggcgggctgtgctgctacctacaacaagcacattaacatcagcttccacaggtttcctttggatcctaaaagaagaaaagaatgggttcgcctggttaggcgcaaaaattttgtgccaggaaaacacacttttctttgctcaaagcactttgaagcctcctgttttgatctaacaggacaaacccgacgacttaaaatggatgctgttccaaccatttttgatttttgtacccatataaagtctctgaaactcaagtcaaggaatcttctgaagacaaacaacagttttcctccaactggaccatgtaatttaaagctgaacggcagtcagcaagtactgcttgaacacagttatgcctttaggaaccctatggaggcgaaaaaaaggataattaaactagaaaaggaaatagcaagcttgagaaaaaaaatgaaaacttgcctgcaaagagaacgcagagcaactcgaaggtggatcaaagccacgtgctttgtgaagagcttagaagcaagtaacatgctacctaagggcatctcagaacagattttaccaactgccttaagcaatcttcctctggaagatttaaaaagtcttgaacaagatcaacaagataaaacagtacccattctctaa

SEQ ID NO: 174 - DNA, 657 bp, Mus musculus
atgccgaagtcttgcgcggcccggcaatgctgcaaccgctacagcagccgcaggaagcagctcaccttccaccggttccccttcagccgcccggagctgttgagggagtgggtgctcaacatcggccgggctgacttcaagcctaagcagcacacagtcatctgctcggaacacttcagacccgagtgcttcagcgcctttgggaaccgcaagaacctgaaacacaatgctgtgcccacggtgttcgcttttcagaaccccacagaggtctgccctgaggtgggggctggtggggacagctcagggaggaacatggacaccacactggaagaacttcagcctccaaccccggaaggccccgtgcagcaggtcttaccagatcgagaagcaatggaggccacggaggccgctggcctgcctgccagccctctggggttgaagaggccccttccgggacagccgtctgatcacagttatgccctttcggacttggataccctcaaaaaaaaactctttctcacactgaaggaaaacaagaggcttcggaagcggctgaaagcccagaggctgctgttgcggaggacatgtggccgcctgagagcctacagagagggacagccgggacctcgggccagacggccggcacagggaagctga

SEQ ID NO: 175 - DNA, 558 bp, Mus musculus
atactgcaagcatttggaagcctaaaaaaaggagatgtgctgtgttcaagacacttcaagaagacagactttgacagaagcactctaaacactaagctgaaggcaggagccatcccttctatctttgaatgtccatatcacttacaggagaaaagagaaaaacttcactgtagaaaaaacttccttctcaaaacccttcccatcacccaccatggccgccagcttgttggtgcctcctgcattgaagaattcgaaccccagttcatttttgaacatagctacagtgttatggacagcccaaagaagcttaagcataagctagaccgtgtgatcatcgagctggagaataccaaggaaagcctacggaatgttttagcccgagaaaaacactttcaaaagtcactgaggaagacaatcatggaactaaaggatgaaagtctgatcagccaggaaacagccaatagtctgggtgctttctgttgggagtgctatcatgaaagcacagcaggaggctgtagttgtgaagtcatttcttatatgcttcatctgcagttgaca

SEQ ID NO: 176 - DNA, 1719 bp, Homo sapiens
ctttccgcgcggcggaagagcgcgcgccagcttcggcacacttgggagccggatcccagccctacgcctcgtcccctacaagctcctccaagccccgccggctgctgtgggagcggcggccgtcctctcctggaggtcgtctcctggcatcctcggggccgcaggaaggaagaggaggcagcggccggagccctggtgggcggcctgaggtgagagcccgaccggcccctttgggaatatggcgaccggtggctaccggaccagcagcggcctcggcggcagcaccacagacttcctggaggagtggaaggcgaaacgcgagaagatgcgcgccaagcagaaccccccgggcccggcccccccgggagggggcagcagcgacgccgctgggaagccccccgcgggggctctgggcaccccggcggccgccgctgccaacgagctcaacaacaacctcccgggcggcgcgccggccgcacctgccgtccccggtcccgggggcgtgaactgcgcggtcggctccgccatgctgacgcgggcgcccccggcccgcggcccgcggcggtcggaggacgagcccccagccgcctctgcctcggctgcaccgccgccccagcgtgacgaggaggagccggacggcgtcccagagaagggcaagagctcgggccccagtgccaggaaaggcaaggggcagatcgagaagaggaagctgcgggagaagcggcgctccaccggcgtggtcaacatccctgccgcagagtgcttagatgagtacgaagatgatgaagcagggcagaaagagcggaaacgagaagatgcaattacacaacagaacactattcagaatgaagctgtaaacttactagatccaggcagttcctatctgctacaggagccacctagaacagtttcaggcagatataaaagcacaaccagtgtctctgaagaagatgtctcaagtagatattctcgaacagatagaagtgggttccctagatataacagggatgcaaatgtttcaggtactctggtttcaagtagcacactggaaaagaaaattgaagatcttgaaaaggaagtagtaacagaaagacaagaaaacctaagacttgtgagactgatgcaagataaagaggaaatgattggaaaactcaaagaagaaattgatttattaaatagagacctagatgacatagaagatgaaaatgaacagctaaagcaggaaaataaaactcttttgaaagttgtgggtcagctgaccaggtagaggattcaagactcaatgtggaaaaaatattttaaactactgattgaatgttaatggtcaatgctagcacaatattcctatgctgcaatacattaaaataactaagcaagtatatttatttctagcaaacagatgtttgttttcaaaatacttctttttcattattggttttaaaaaagcattatccttttatctcacaaataagtaatatctttcagttattaaatgatagataatgcctttttggttttgtgtggtattcaactaatacatggtttaaagtcacagccgtttgaatatattttatcttggtagtacattttctcccttaggaatatacatagtctttgtttacatgagttccaatacttttgggatgttaccctcacatgtccctatactgatgtgtgccaccttttatgtgttgatgactcactcataaggttttggtc

SEQ ID NO: 177 - DNA, 878 bp, Homo sapiens
atcccagcccacgcacagacccccaacttgcagctgcccacctcaccctcagctctggcctcttactcaccctctaccacagacatggctcagtcactggctctgagcctccttatcctggttctggcctttggcatccccaggacccaaggcagtgatggaggggctcaggactgttgcctcaagtacagccaaaggaagattcccgccaaggttgtccgcagctaccggaagcaggaaccaagcttaggctgctccatcccagctatcctgttcttgccccgcaagcgctctcaggcagagctatgtgcagacccaaaggagctctgggtgcagcagctgatgcagcatctggacaagacaccatccccacagaaaccagcccagggctgcaggaaggacaggggggcctccaagactggcaagaaaggaaagggctccaaaggctgcaagaggactgagcggtcacagacccctaaagggccatagcccagtgagcagcctggagccctggagaccccaccagcctcaccagcgcttgaagcctgaacccaagatgcaagaaggaggctatgctcaggggccctggagcagccaccccatgctggccttgccacactctttctcctgctttaaccaccccatctgcattcccagctctaccctgcatggctgagctgcccacagcaggccaggtccagagagaccgaggagggagagtctcccagggagcatgagaggaggcagcaggactgtccccttgaaggagaatcatcaggaccctggacctgatacggctccccagtacaccccacctcttccttgtaaatatgatttatacctaactgaataaaaagctgttctgtcttcccacccaa

SEQ ID NO: 178 - protein, 34 aa, Artificial Sequence
  Interferon gamma homology motif of THAP1
NYTVEDTMHQRKRIHQLEQQVEKLRKKLKTAQQR

SEQ ID NO: 179 - protein, 20 aa, Artificial Sequence
  Nuclear localization sequence of THAP1
RKRIHQLEQQVEKLRKKLKT

SEQ ID NO: 180 - protein, 38 aa, Artificial Sequence
  Consensus sequence for PAR4 binding domain of THAP
  UNSURE 3-16, 19, 23, 25-35: Xaa = any of the twenty amino acids
  VARIANT 37: Xaa = Arg or Lys
LEXXXXXXXXXXXXXXQRXRRQXRXXXXXXXXXXXQRE

SEQ ID NO: 181 - DNA, 50 bp, Artificial Sequence
  Primer
gaattcggccattatggcctgcaggatccggccgcctcggcccaggatcc

SEQ ID NO: 182 - protein, 111 aa, Homo sapiens
SDGGAQDCCLKYSQRKIPAKVVRSYRKQEPSLGCSIPAILFLPRKRSQAELCADPKELWVQQLMQHLDKTPSPQKPAQGCRKDRGASKTGKKGKGSKGCKRTERSQTPKGP

SEQ ID NO: 183 - DNA, 37 bp, Artificial Sequence
  Primer
gcgggatccgtagtgatggaggggctcaggactgttg

SEQ ID NO: 184 - DNA, 35 bp, Artificial Sequence
  Primer
gcgggatccctatggccctttaggggtctgtgacc

SEQ ID NO: 185 - DNA, 33 bp, Artificial Sequence
  Primer
ccgaattcaggatggtgcagtcctgctccgcct

SEQ ID NO: 186 - DNA, 39 bp, Artificial Sequence
  Primer
cgcggatcctgctggtacttcaactatttcaaagtagtc

SEQ ID NO: 187 - DNA, 33 bp, Artificial Sequence; identical to SEQ ID NO: 185
  Primer

SEQ ID NO: 188 - DNA, 39 bp, Artificial Sequence; identical to SEQ ID NO: 186
  Primer

SEQ ID NO: 189 - DNA, 33 bp, Artificial Sequence
  Primer
gcggaattcatggcgaccggtggctaccggacc

SEQ ID NO: 190 - DNA, 35 bp, Artificial Sequence
  Primer
gcgggatccctctacctggtcagctgacccacaac

SEQ ID NO: 191 - DNA, 33 bp, Artificial Sequence; identical to SEQ ID NO: 185
  Primer

SEQ ID NO: 192 - DNA, 39 bp, Artificial Sequence; identical to SEQ ID NO: 186
  Primer

SEQ ID NO: 193 - DNA, 46 bp, Artificial Sequence
  Primer
cgcgaattcgccatcatggggttccctagatataacagggatgcaa

SEQ ID NO: 194 - DNA, 37 bp, Artificial Sequence
  Primer
gccggatccgggttccctagatataacagggatgcaa

SEQ ID NO: 195 - DNA, 37 bp, Artificial Sequence
  Primer
gcgctctagagccatcatggaggagcagaagctgatc

SEQ ID NO: 196 - DNA, 37 bp, Artificial Sequence
  Primer
cttgcggccgcctctacctggtcagctgacccacaac

SEQ ID NO: 197 - DNA, 37 bp, Artificial Sequence
  Primer
gcggaattcaaagaagatcttctggagccacaggaac

SEQ ID NO: 198 - DNA, 39 bp, Artificial Sequence; identical to SEQ ID NO: 186
  Primer

SEQ ID NO: 199 - DNA, 35 bp, Artificial Sequence
  Primer
gcggaattcatgccgcctcttcagacccctgttaa

SEQ ID NO: 200 - DNA, 36 bp, Artificial Sequence
  Primer
gcggaattcatgcaccagcggaaaaggattcatcag

SEQ ID NO: 201 - DNA, 33 bp, Artificial Sequence; identical to SEQ ID NO: 185
  Primer

SEQ ID NO: 202 - DNA, 39 bp, Artificial Sequence
  Primer
gcgggatcccttgtcatgtggctcagtacaaagaaatat

SEQ ID NO: 203 - DNA, 34 bp, Artificial Sequence
  Primer
cgggatcctgtgcggtcttgagcttctttctgag

SEQ ID NO: 204 - DNA, 36 bp, Artificial Sequence
  Primer
gcgggatccgtcgtctttctctttctggaagtgaac

SEQ ID NO: 205 - protein, 36 aa, Artificial Sequence
  Consensus sequence for PAR4 binding domain of THAP
  UNSURE 3-14, 17, 21, 23-33, 35: Xaa = any of the twenty amino acids
LEXXXXXXXXXXXXQRXRRQXRXXXXXXXXXXXQXE

SEQ ID NO: 206 - DNA, 39 bp, Artificial Sequence
  Primer
ccgcacagcagcgatgcgctgctcaagaacggcagcttg

SEQ ID NO: 207 - DNA, 39 bp, Artificial Sequence
  Primer
caagctgccgttcttgagcagcgcatcgctgctgtgcgg

SEQ ID NO: 208 - DNA, 32 bp, Artificial Sequence
  Primer
gctcaagaccgcacagcaagaacggcagcttg

SEQ ID NO: 209 - DNA, 32 bp, Artificial Sequence
  Primer
caagctgccgttcttgctgtgcggtcttgagc

SEQ ID NO: 210 - DNA, 36 bp, Artificial Sequence
  Primer
gcgggatccctaaattagaaaggggtgggggtagcc

SEQ ID NO: 211 - DNA, 32 bp, Artificial Sequence
  Primer
gcggaattcatggagcctgcacccgcccgatc

SEQ ID NO: 212 - DNA, 37 bp, Artificial Sequence; identical to SEQ ID NO: 197
  Primer

SEQ ID NO: 213 - DNA, 39 bp, Artificial Sequence; identical to SEQ ID NO: 186
  Primer

SEQ ID NO: 214 - DNA, 33 bp, Artificial Sequence
  Primer
cgcggatccgtgcagtcctgctccgcctacggc

SEQ ID NO: 215 - DNA, 39 bp, Artificial Sequence
  Primer
ccgaattcttatgctggtacttcaactatttcaaagtag

SEQ ID NO: 216 - DNA, 33 bp, Artificial Sequence
  Primer
gccgaattcatgccgaacttctgcgctgccccc

SEQ ID NO: 217 - DNA, 40 bp, Artificial Sequence
  Primer
cgcggatccttaggttattttccacagtttcggaattatc

SEQ ID NO: 218 - DNA, 39 bp, Artificial Sequence
  Primer
gcgctgcagcaagctaaatttaaatgaaggtactcttgg

SEQ ID NO: 219 - DNA, 35 bp, Artificial Sequence
  Primer
gcgagatctgggaaatgccgaccaattgcgctgcg

SEQ ID NO: 220 - DNA, 35 bp, Artificial Sequence
  Primer
agaggatccttagctctgctgctctggcccaagtc

SEQ ID NO: 221 - DNA, 32 bp, Artificial Sequence
  Primer
agagaattcatgccgaagtcgtgcgcggcccg

SEQ ID NO: 222 - DNA, 32 bp, Artificial Sequence
  Primer
gcggaattcatgccgcgtcactgctccgccgc

SEQ ID NO: 223 - DNA, 34 bp, Artificial Sequence
  Primer
gcgggatcctcaggccatgctgctgctcagctgc

SEQ ID NO: 224 - DNA, 38 bp, Artificial Sequence
  Primer
gcgagatctcgatggtgaaatgctgctccgccattgga

SEQ ID NO: 225 - DNA, 39 bp, Artificial Sequence
  Primer
gcgggatcctcatgaaatatagtcctgttctatgctctc

SEQ ID NO: 226 - DNA, 35 bp, Artificial Sequence
  Primer
gcgagatctcgatgcccaagtactgcagggcgccg

SEQ ID NO: 227 - DNA, 37 bp, Artificial Sequence
  Primer
gcggaattcttatgcactggggatccgagtgtccagg

SEQ ID NO: 228 - DNA, 32 bp, Artificial Sequence
  Primer
gcggaattcatgccggcccgttgtgtggccgc

SEQ ID NO: 229 - DNA, 39 bp, Artificial Sequence
  Primer
gcgggatccttaacatgtttcttctttcacctgtacagc

SEQ ID NO: 230 - DNA, 36 bp, Artificial Sequence
  Primer
gcgagatctcgatgcctggctttacgtgctgcgtgc

SEQ ID NO: 231 - DNA, 36 bp, Artificial Sequence
  Primer
gcggaattctcacattccgtgcttcttgcggatgac

SEQ ID NO: 232 - DNA, 33 bp, Artificial Sequence; identical to SEQ ID NO: 185
  Primer

SEQ ID NO: 233 - DNA, 39 bp, Artificial Sequence; identical to SEQ ID NO: 186
  Primer

SEQ ID NO: 234 - DNA, 37 bp, Artificial Sequence; identical to SEQ ID NO: 195
  Primer

SEQ ID NO: 235 - DNA, 41 bp, Artificial Sequence
  Primer
gcgctctagattatgctggtacttcaactatttcaaagtag

SEQ ID NO: 236 - DNA, 33 bp, Artificial Sequence; identical to SEQ ID NO: 214
  Primer

SEQ ID NO: 237 - DNA, 39 bp, Artificial Sequence; identical to SEQ ID NO: 186
  Primer

SEQ ID NO: 238 - DNA, 37 bp, Artificial Sequence; identical to SEQ ID NO: 194
  Primer

SEQ ID NO: 239 - DNA, 35 bp, Artificial Sequence; identical to SEQ ID NO: 190
  Primer

SEQ ID NO: 240 - DNA, 35 bp, Artificial Sequence
  Primer
gcgggatccagtgatggaggggctcaggactgttg

SEQ ID NO: 241 - DNA, 35 bp, Artificial Sequence; identical to SEQ ID NO: 184
  Primer

SEQ ID NO: 242 - DNA, 33 bp, Artificial Sequence
  Primer
gcgcatatggtgcagtcctgctccgcctacggc

SEQ ID NO: 243 - DNA, 36 bp, Artificial Sequence
  Primer
gcgctcgagtttcttgtcatgtggctcagtacaaag

SEQ ID NO: 244 - DNA, 62 bp, Artificial Sequence
  Oligonucleotide
  unsure 21-45: n = any of the four nucleotides
tgggcactatttatatcaacnnnnnnnnnnnnnnnnnnnnnnnnnaatgtcgttggtggccc

SEQ ID NO: 245 - DNA, 30 bp, Artificial Sequence
  Primer
accgcaagcttgggcactatttatatcaac

SEQ ID NO: 246 - DNA, 24 bp, Artificial Sequence
  Primer
ggtctagagggccaccaacgcatt

SEQ ID NO: 247 - DNA, 2173 bp, Homo sapiens
gacgggcgatggctgtggtccttctgctaatgcaaacaacaaaacgggcacactagtcacccccgagggaggccaccatcactgtaactgttggccaaagctacaaaagaagcgagggaatccaaccgagcgcagcgacactgagaacagcttcccctgccttctgcggcggcagaagtgaagtgcctgaggaccggaaggatggtgcagtcctgctccgcctacggctgcaagaaccgctacgacaaggacaagcccgtttctttccacaagtttcctcttactcgacccagtctttgtaaagaatgggaggcagctgtcagaagaaaaaactttaaacccaccaagtatagcagtatttgttcagagcactttactccagactgctttaagagagagtgcaacaacaagttactgaaagagaatgctgtgcccacaatatttctttgtactgagccacatgacaagaaagaagatcttctggagccacaggaacagcttcccccacctcctttaccgcctcctgtttcccaggttgatgctgctattggattactaatgccgcctcttcagacccctgttaatctctcagttttctgtgaccacaactatactgtggaggatacaatgcaccagcggaaaaggattcatcagctagaacagcaagttgaaaaactcagaaagaagctcaagaccgcacagcagcgatgcagaaggcaagaacggcagcttgaaaaattaaaggaggttgttcacttccagaaagagaaagacgacgtatcagaaagaggttatgtgattctaccaaatgactactttgaaatagttgaagtaccagcataaaaaaatgaaatgtgtattgatttctaatggggcaataccacatatcctcctctagcctgtaaaggagtttcatttaaaaaaataacatttgattacttatataaaaacagttcagaatatttttttaaaaaaaattctatatatactgtaaaattataaatttttttgtttgtaatttcaggttttttacattttaacaaaatattttaaaagttataaactaacctcagacctctaatgtaagttggtttcaagattggggattttggggttttttttttagtatttatagaaataatgtaaaaataaaaagtaaagagaatgagaacagtgtggtaaaagggtgatttcagtttaaaacttaaaattagtactgttttattgagagaatttagttatattttaaatcagaagtatgggtcagatcatgggacataacttcttagaatatatatatacatatgtacatattctcatatgtaaagtcacaaggttcatttatctttctgaatcagttatcaaagataaattggcaagtcagtacttaagaaaaaagatttgattatcatcacagcagaaaaaagtcattgcatatctgatcaataacttcagattctaagagtggattttttttttttacatgggctcctattttttcccctactgtcttgcattataaaattagaagtgtattttcagtggaagaaacatttttcaataaataaagtaaggcattgtcatcaatgaagtaattaaaactgggacctgatctatgatacgcttttttctttcattacaccctagctgaaggacatcccagttccccagctgtagttatgtatctgccttcaagtctctgacaaatgtgctgtgttagtagagtttgatttgtatcatatgataatcttgcacttgactgagttgggacaaggcttcacataaaaaattatttcttcacttttaacacaagttagaaattatatcccatttagttaaatgcgtgatttatattcagaacaacctactatgtagcgtttattttactgaatgtggagatttaaacactgaggtttctgttcaaactgtgagttctgttctttgtgagaaattttacatatattggaagtgaaaatatgttctgagtaaacaaatattgctatgggagttatctttttagatttagaataactgttccaatgataattattacttttatatttcaaagtacactaagatcgttgaagagcaatagaacctttaagacagtattaaaggtgtgaaacaaaaaaaaaaaaaataaaaaaaaaaaaaaaaaaaaaaaaaaaaaaaa

SEQ ID NO: 248 - DNA, 1302 bp, Homo sapiens
aattgctctgaggaccgctgccaaagaaacgcagtagatccgctccctcttgggggcggggagaaagaacgggttgtgtccgccatgttggtgaagtcaagcgaaggcgactagagctccaggagggccagttctgtgggctctagtcggccatattaataaagagaaagggaaggctgaccgtccttcgcctccgcccccacatacacaccccttcttcccactccgctctcacgactaagctctcacgattaaggcacgcctgcctcgattgtccagcctctgccagaagaaagcttagcagccagcgcctcagtagagacctaagggcgctgaatgagtgggaaagggaaatgccgaccaattgcgctgcggcgggctgtgccactacctacaacaagcacattaacatcagcttccacaggtttcctttggatcctaaaagaagaaaagaatgggttcgcctggttaggcgcaaaaattttgtgccaggaaaacacacttttctttgttcaaagcactttgaagcctcctgttttgacctaacaggacaaactcgacgacttaaaatggatgctgttccaaccatttttgatttttgtacccatataaagtctatgaaactcaagtcaaggaatcttttgaagaaaaacaacagttgttctccagctggaccatctaatttaaaatcaaacattagtagtcagcaagtactacttgaacacagctatgcctttaggaatcctatggaggcaaaaaagaggatcattaaactggaaaaagaaatagcaagcttaagaagaaaaatgaaaacttgcctacaaaaggaacgcagagcaactcgaagatggatcaaagccacgtgtttggtaaagaatttagaagcaaatagtgtattacctaaaggtacatcagaacacatgttaccaactgccttaagcagtcttcctttggaagattttaagatccttgaacaagatcaacaagataaaacactgctaagtctaaatctaaaacagaccaagagtaccttcatttaaatttagcttgcacagagcttgatgcctatccttcattcttttcagaagtaaagataattatggcacttatgccaaaattcattatttaataaagttttacttgaagtaacattactgaatttgtgaagacttgattacaaaagaataaaaaacttcatatggaaattttatttgaaaatgagtggaagtgccttacattagaattacggacttaaaaattttgctaataaattgtgtatttgaaaaaaaaaaaaaaaaaaaa

SEQ ID NO: 249 - DNA, 1995 bp, Homo sapiens
ccagtgacgtcagaggagtccagacctattcacaattcaaagccctaaaaacactgaggggttggccgttggtttccagttgtccaagcctgtgagtggctatgcgtcctggttgggtgctcaaagcaaggaggtgaaaggcgaccagcattggcgaatggggtaagacttgcacaggcccaaggctaggagttggggtttcgggcctgaattggggcccggagcacccctttacgtggcgccccgggtcccgtccgaccctggggagacgcgggtggctgggatggcaggatgagcgcgccctggaggcgagccaggcccgtcaccacctcccagcggccccgcccctccccgcaggtccctcccctctccgcaggccccgccgccgccgccatctttgttgggggcagccaggcctggctcgagatgccgaagtcgtgcgcggcccggcagtgctgcaaccgctacagcagccgcaggaagcagctcaccttccaccggtttccgttcagccgcccggagctgctgaaggaatgggtgctgaacatcggccggggcaacttcaagcccaagcagcacacggtcatctgctccgagcacttccggccagagtgcttcagcgcctttggaaaccgcaagaacctaaagcacaatgccgtgcccacggtgttcgcctttcaggaccccacacagcaggtgagggagaacacagaccctgccagtgagagaggaaatgccagctcttctcagaaagaaaaggtcctccctgaggcgggggccggagaggacagtcctgggagaaacatggacactgcacttgaagagcttcagttgcccccaaatgccgaaggccacgtaaaacaggtctcgccacggaggccgcaagcaacagaggctgttggccggccgactggccctgcaggcctgagaaggacccccaacaagcagccatctgatcacagctatgcccttttggacttagattccctgaagaaaaaactcttcctcactctgaaggaaaatgaaaagctccggaagcgcttgcaggcccagaggctggtgatgcgaaggatgtccagccgcctccgtgcttgcaaagggcaccagggactccaggccagacttgggccagagcagcagagctgagccccacaggctccggacgcagaggtggcagtggcaccagggccggcagagctttggagctctggctgtggacatttttgtctgctgtggacactgagaaagttggccatgaggcctgcttggccggggatcgagacagtagccaagctccccggcgagagccccaatgccgtctgggggacgtttagaggcgtggcactaggagtgcacatctgtgagcatgacaagcttatcctcccatggtaacagaagtccaggctgaggctgattctggacgctgccctttcagcacacgcagagcaaagatcgttggaagccccagtgtgggagatgctcctcagggaggaagccatgtgagggggctggctctgtggcgggtgagtggtcccctcctccatcagcctggacagccgctcggggttctaaggagtgactcctgtcccggcctggtgtgagtgggcagtgtaataaagtgtctttctatacggtgtcgctcccatcatcattttctctagtgccgtgattccttctaagaagactgacttccgtggccgggcgcagtggctcatgcctgtaatcccagcactttgagaggccgaggtggggagatcacttgaggtcaggagttcaagaccagcctggccaacatggtgaaatcccatgtctactaaaaaagacacaaattagccaggcgtggtggcacacacctgtagtcccagctacctgggaggctgagacaggaggatcagctgaacccgggaggtggaggttgcagtgagccgagatcacaccactgccctctagtattgtcactgggtgacagagcgagactcagtctgaaaaaaaaaa

SEQ ID NO: 250 - DNA, 1999 bp, Homo sapiens
gggctagggccggggcctggctgcgcggctgggccaaggcccgcgatggtgatctgctgtgcggccgtgaactgctccaaccggcagggaaagggcgagaagcgcgccgtctccttccacaggttccccctaaaggactcaaaacgtctaatccaatggttaaaagctgttcagagggataactggactcccactaagtattcatttctctgtagtgagcatttcaccaaagacagcttctccaagaggctggaggaccagcatcgcctgctgaagcccacggccgtgccatccatcttccacctgaccgagaagaagaggggggctggaggccatggccgcacccggagaaaagatgccagcaaggccacagggggtgtgaggggacactcgagtgccgccaccggcagaggagctgcaggttggtcaccgtcctcgagtggaaacccgatggccaagccagagtcccgcaggttgaagcaagctgctctgcaaggtgaagccacacccagggcggcccaggaggccgccagccaggagcaggcccagcaagctctggaacggactccaggagatggactggccaccatggtggcaggcagtcagggaaaagcagaagcgtctgccacagatgctggcgatgagagcgccacttcctccatcgaagggggcgtgacagataagagtggcatttctatggatgactttacgcccccaggatctggggcgtgcaaatttatcggctcacttcattcgtacagtttctcctctaagcacacccgagaaaggccatctgtcccccgagagcccattgaccgcaagaggctgaagaaagatgtggaaccaagctgcagtgggagcagcctgggacccgacaagggcctggcccagagccctcccagctcatcacttaccgcgacaccgcagaagccttcccagagcccctctgcccctcctgccgacgtcaccccaaagccagccacggaagccgtgcagagcgagcacagcgacgccagccccatgtccatcaacgaggtcatcctgtcggcgtcaggggcctgcaagctcatcgactcactgcactcctactgcttctcctcccggcagaacaagagccaggtgtgctgcctgcgggagcaggtggagaagaagaacggcgagctgaagagcctgcggcagagggtcagccgctccgacagccaggtgcggaagctacaggagaagctggatgagctgaggagagtgagcgtcccctatccaagtagcctgctgtcgcccagccgcgagccccccaagatgaacccagtggtggagccactgtcctggatgctgggcacctggctgtcggacccacctggagccgggacctaccccacactgcagcccttccagtacctggaggaggttcacatctcccacgtgggccagcccatgctgaacttctcgttcaactccttccacccggacacgcgcaagccgatgcacagagagtgtggcttcattcgcctcaagcccgacaccaacaaggtggcctttgtcagcgcccagaacacaggcgtggtggaagtggaggagggcgaggtgaacgggcaggagctgtgcatcgcatcccactccatcgccaggatctccttcgccaaggagccccacgtagagcagatcacccggaagttcaggctgaattctgaaggcaaacttgagcagacggtctccatggcaaccacgacacagccaatgactcagcatcttcacgtcacctacaagaaggtgaccccgtaaacctagagcttctggagccctcgggagggcctggctactgtgcctcaacggttcggctcctcaacagacagtccctgcggcaaaagtgggtgtggccgtgagcctctgcaggctcaagagtgttgtccagatgtttctgtactggcatagaaaaaccaaataaaaggcctttatttttatggctgaggattttgaatattaaaaaaaaaaaaaaaaaaaa

SEQ ID NO: 251 - DNA, 1398 bp, Homo sapiens
ggctgtgcgccacttccggcttcaacccccgaaaaggcggtgcttaaaccggaggaggcggaagtgagtcgacagacgaggcggctttcccggcagaatgctagcgcaggcgcaggggctcgagaggcctggacctgtggcgcatcctcagtgaggagggccgccctgcatccgtcgccggccccggtctccaggggcctcacccgagtcatgccccgctattgcgcagcgatttgttgtaagaaccgccggggacgaaacaataaagaccggaagctgagtttttatccatttcctctacatgacaaagaaagactggaaaagtggttaaagaatatgaagcgagattcatgggttcccagtaaataccagtttctatgtagtgaccattttactcctgactctcttgacatcagatggggtattcgatatttaaaacaaactgcagttccaacaatattttctttgcctgaagacaatcagggaaaagacccttctaaaaaaaaatcccagaagaaaaacttggaagatgagaaagaagtatgcccaaaagccaagtcagaagaatcatttgtattaaatgagacaaagaaaaatatagttaacacagatgtgccccatcaacatccagaattacttcattcatcttccttggtaaagccaccagctcccaaaacaggaagtatacaaaataacatgttaactcttaatctagttaaacaacatactgggaaaccagaatctaccttggaaacatcagttaaccaagatacaggtagaggtggttttcacacatgttttgagaatctaaattctacaactattactttgacaacttcaaattcagaaagtattcatcaatctttggaaactcaagaagttcttgaagtaactaccagtcatcttgctaatccaaactttacaagtaattccatggaaataaagtcagcacaggaaaatccattcttattcagcacaattaatcaaacagttgaagaattaaacacaaataaagaatctgttattgccatttttgtacctgctgaaaattctaaaccctcagttaattcttttatatctgcacaaaaagaaaccacggaaatggaagacacagacattgaagactccttgtataaggatgtagactatgggacagaagttttacaaatcgaacattcttactgcagacaagatataaataaggaacatctttggcagaaagtctctaagctacattcaaagataactcttctagagttaaaagagcaacaaactctaggtagattgaagtctttggaagctcttataaggcagctaaagcaggaaaactggctatctgaagaaaacgtcaagattatagaaaaccattttacaacatatgaagtcactatgatatag

SEQ ID NO: 252 - DNA, 2291 bp, Homo sapiens
agcgaaggcagacgcagtctccatcgttgacgttagtcgcagtcttcgctgctaacgttttgttatgagttgctaaaatggtgaaatgctgctccgccattggatgtgcttctcgctgcttgccaaattcgaagttaaaaggactgacatttcacgtattccccacagatgaaaacatcaaaaggaaatgggtattagcaatgaaaagacttgatgtgaatgcagccggcatttgggagcctaaaaaaggagatgtgttgtgttcgaggcactttaagaagacagattttgacagaagtgctccaaatattaaactgaaacctggagtcataccttctatctttgattctccatatcacctacaggggaaaagagaaaaacttcattgtagaaaaaacttcaccctcaaaaccgttccagccactaactacaatcaccatcttgttggtgcttcctcatgtattgaagaattccaatcccagttcatttttgaacatagctacagtgtaatggacagtccaaagaaacttaagcataaattagatcatgtgatcggcgagctagaggatacaaaggaaagtctacggaatgttttagaccgagaaaaacgttttcagaaatcattgaggaagacaatcagggaattaaaggatgaatgtctgatcagccaagaaacagcaaatagactggacactttctgttgggactgttgtcaggagagcatagaacaggactatatttcatgaaataatttcatgttacgttccacctaaaattgtcattggtacaaatttttataaaatctcatttaccatcactaaataatatccatcatttaaagtgctgctttggattctctggagcattatgcattatagttgttatccaaagacttttttgaaaatatgcagaaatttgtggtaattatgtatttgtgtcttgtgacaattatgttttatagacctacactagtgccaggtcactattgtaagatgttaaaatctcaagaaaatttcacagagctaaagaaatgatgtcaaattagtcacattaagctatagtagaaggaattggacacttctccagatatttggcttcaaaggagtacctttacttacatgtgctttatggtaagtacattgaattttactttaaatgcattttactacaaagcacaattcatttgtaatgcatatccatcttggattcaatccaaggtgctttagctatcagtagtaccaaaggatctttttacaaggcttcctgtggtattgactctgagaataacacatagtgaagatctgtgggcttttaaaattgttcacagccaatttaagaagacccctcatgaagtctcagttttcagtacagtacatcattcctcctcactaggagcactttgatgtaaaccagaatagctttaaaaagacaaaaaggatcgtagatctgatttttaaatggttggttgctctgacagatctgaacactttgcttcatgactatttcgtcataaaggtatatgtttaaaatctgaatggcagtactagctctatacttttaatactgctttgtattttatatgtaaagtagtattgctgacattttaaaaaaatacaaaatacaaaagaaaccattagaaattaataactgtggctcttccagttgaaataggaattggagagaaaggattagaatattttaattaggggagtagattattgtccaaaggcttttatttagagaaacgggtaattaaaacagcagctttagaatagcttcttactgaatatgcaaaagaataattccttgttatttcctaattgatccaagtctcataaatttagcttttgtcataattccttaccgaaaacaactgaaattgagagtcataaatactgtgggttagaataaaaaccatttgccaaagcaacactctacttagaagcacatgtacatacatggacctcattcagaagtccatgttgtagcagttagaatttgagtatcagccatttcattgtagtaacaaaaattgaattgcattttgtgctcagttgtttattgtaattttatttttgttacattaatattagttaagatatggtcacttgaattttttgtatttaagaattttctgttttaatgcatgttatacttttatgtaggattcccaaccttccctctaaatgggatttaacccacatctgcgagatcagcgttatgctaagaggaaatcactgaggccatatctttttacaatctgaaaaaaaagtagtaaaaaggtagttaaa

SEQ ID NO: 253 - DNA, 1242 bp, Homo sapiens
cgtgagtgccgctgacagaagtcaagagaatcggctgggacggggttggggcgacaacgggccgggggggacccgacaggccagagccccttggggaggagcggcggctggaggcgcgaggctcctccggatgcccggagagccgcttgcgacttaactcccgcctctttcccagatgccgcgtcactgctccgccgccggctgctgcacacgggacacgcgcgagacgcgcaaccgcggcatctccttccacagacttcccaagaaggacaacccgaggcgaggcttgtggctggccaactgccagcggctggaccccagcggccagggcctgtgggacccggcatccgagtacatctacttctgctccaaacactttgaggaggactgctttgagctggtgggaatcagtggatatcacaggctaaaggagggggcagtccccaccatatttgagtctttctccaagttgcgccggacaaccaagaccaaaggacacagttacccacctggcccccctgaagtcagccggctcagacgatgcaggaagcgctgctccgagggccgagggcccacaactccattttctccacctccacctgctgatgtcacctgctttcctgtggaagaggcctcagcacctgccactttgccggcctccccagctgggaggctggagcctggccttagcagccccttttcagacctactgggccccttgggtgcccaggcagatgaagcaggctgcagcgcccagccttcaccagagcggcagccctcccctctcgaaccacggccagtctccccctcagcgtatatgctgcgcctgcccccacccgccggagcctacatccagaatgaacacagctaccaggtgggcagcgccttactctggaagcggcgagccgaggcagcccttgatgcccttgacaaggcccagcgccagctgcaggcctgcaagcggcgggagcagcggctgcggttgagactgaccaagctgcagcaggagcgggcacgggagaagcgggcacaggcagatgcccgccagactctgaaggagcatgtgcaggactttgccatgcagctgagcagcagcatggcctgaggggctgctggactgaccgaggggctgcccagcaagactgcagcctcttcctccctcagatcccaccagacccaccaggtgccataataaagcggattctagacggagaaaaaaaaaaaaaaaaaaaaaaaaaaaaa

SEQ ID NO: 254 - DNA, 1383 bp, Homo sapiens
agcgggggtcggggttaggcggcgctccgcgagaaccaaagtgcagccgctgacccggcaaaactcagcgggggctggatagccatgcccaagtactgcagggcgccgaactgctccaacactgcgggccgcctgggtgcagacaaccgccctgtgagcttctacaagttcccactgaaggatggtccccggctgcaggcctggctgcagcacatgggctgtgagcactgggtgcccagctgccaccagcacttgtgcagcgagcacttcacaccctcctgcttccagtggcgctggggtgtgcgctacctgcggcctgatgcagtgccctccatcttctcccggggaccacctgccaagagtcagcggaggacccgaagcacccagaagccagtctcgccgccgcctcccctacagaagaatacacccctgccccagagccctgccatcccagtctctggcccagtgcgcctagtggtgctgggccccacatcggggagccccaagactgtggccaccatgctcctgacccccctggcccctgcgccaactcctgagcggtcacaacctgaagtccctgcccaacaggcccagaccgggctgggcccagtgctgggagcactgcaacgccgggtgcggaggctgcaacggtgccaggagcggcaccaggcgcagctgcaggccctggaacggctggcacagcagctacacggggagagcctgctggcacgggcacgccggggtctgcagcgcctgacaacagcccagacccttggacctgaggaatcccaaaccttcaccatcatctgtggagggcctgacatagccatggtccttgcccaggaccctgcacctgccacagtggatgccaagccggagctcctggacactcggatccccagtgcataaggatcaagacagacaatgtcgagggacaaaagatagaagatggaggaggaaagacattatacgtgggcttggcccagccccaccgcccacgcctgggtagtagcagtgcctccctcaagggcctgggttctaccaccccactcctagggatctcttgaaccttaggggtgacctgggcccaagtctctcatcagcccccaatcccctgggtaccaggcttctgccacccccggctcagatctttgcaaatcagtacgacagcctcagagcagagcaagggttgtttgggagaatcatacctggttctaaggagtcccacgctttttgccaagcctggtactgagttcatgataccatggtggacacagctgagaaaatccctgccctcatggtgctcattctacttgagtagacgatgaactagtaaacaaataaacaagaacactgcagacatgaaaaaaaaaaaaaaaaaaa

SEQ ID NO: 255 - DNA, 3627 bp, Homo sapiens
attcatgctgtcgcgggaaccccgaaggtggggccccacgtaacaagaagatgacccgaagttgctccgcagtgggctgcagcacccgtgacaccgtgctcagccgggagcgcggcctctccttccaccaatttccaactgataccatacagcgctcaaaatggatcagggctgttaatcgtgtggaccccagaagcaaaaagatttggattccaggaccaggtgctatactgtgttccaaacattttcaagaaagtgactttgagtcatatggcataagaagaaagctgaaaaaaggagctgtgccttctgtttctctatacaagattcctcaaggtgtacatcttaaaggtaaagcaagacaaaaaatcctaaaacaacctcttccagacaattctcaagaagttgctactgaggaccataactatagtttaaagacacctttgacgataggtgcagagaaactggctgaggtgcaacaaatgttacaagtgtccaaaaaaagacttatctccgtaaagaactacaggatgatcaagaagagaaagggtttacgattaattgatgcacttgtagaagagaaactactttctgaagaaacagagtgtctgctacgagctcaattttcagattttaagtgggagttatataattggagagaaacagatgagtactccgcagaaatgaaacaatttgcatgtacactctacttgtgcagtagcaaagtctatgattatgtaagaaagattcttaagctgcctcattcttccatcctcagaacgtggttatccaaatgccaacccagtccaggtttcaacagcaacattttttcttttcttcaacgaagagtagagaatggagatcagctctatcaatactgttcattgttaataaaaagtatacctctcaagcaacagcttcagtgggatcctagcagtcacagtttgcaggggtttatggactttggtcttggaaaacttgatgctgatgaaacgccacttgcttcagaaactgttttgttaatggcagtgggtatttttggccattggagaacacctcttggttatttttttgtaaacagagcatctggatatttgcaggctcagctgcttcgtctgactattggtaaactgagtgacataggaatcacagttctggctgttacatctgatgccacagcacatagtgttcagatggcaaaagcattggggatacatattgatggagacgacatgaaatgtacatttcagcatccttcatcttctagtcaacagattgcatacttctttgactcttgccacttgctaagattaataagaaatgcatttcagaattttcaaagcattcagtttattaatggtatagcacattggcagcacctcgtggagttagtagcactggaggaacaggaattatcaaatatggaaagaataccaagtacacttgcaaatttgaaaaatcatgtactgaaagtgaatagtgccacccaactctttagtgagagtgtagccagtgcattagaatatttgttatccttagacctgccaccttttcaaaactgtattggtaccatccattttttacgtttaattaacaatctgtttgacatctttaatagtaggaactgttatggaaagggacttaaagggcctctgttgcctgaaacttacagtaaaataaaccacgtgttaattgaagccaagactatttttgttacattatctgacactagcaataatcaaataattaaaggtaagcaaaaactaggattcctgggatttttgctcaatgctgagagcttaaaatggctctaccaaaattatgttttcccaaaggtcatgccttttccttatcttctgacttacaaattcagtcatgatcatctggaattatttctaaagatgcttaggcaggtattagtaacaagttctagccctacctgcatggcattccagaaagcttactataatttggagaccagatacaaatttcaagatgaagtttttctaagcaaagtaagcatctttgacatttcaattgctcgaaggaaagacttggcgctttggacagttcaacgtcagtatggtgtcagcgttacaaagactgtctttcacgaagagggtatttgtcaagactggtctcattgttcactaagtgaggcattactagacctgtcagatcataggcgaaatctcatctgttatgctggttatgttgcaaacaagttatcagctcttttaacttgtgaggactgcatcactgcactgtatgcatcggatctcaaagcctctaaaattgggtcactattatttgttaaaaagaagaatggtttgcattttccttcagaaagtctgtgtcgggtcataaatatttgtgagcgagttgtaagaacccattcaagaatggcaatttttgaactagtttctaaacaaagggaattgtatcttcaacagaaaatattatgtgagctttctgggcatattgatctttttgtagatgtgaataagcatctctttgatggagaagtgtgtgccatcaatcactttgtcaagttgctaaaggatataataatctgtttcttaaatatcagagctaaaaatgttgcacagaatcctttaaaacatcattcagagagaactgatatgaaaactttatcaaggaaacactggtcacctgtacaggattataaatgttcaagttttgctaataccagtagtaaattcaggcatttgctaagtaacgatggatatccattcaaatgagagacctaaaatatattaacattttaattaagaatacttgatcaacattttttgaagttcaatttaccatattttataaattgcgcattctgcacagtggacaagtttgcaattctgacttattaaaatttcaaattctgcatatcacaaaatctccttatacttttggtatggcttgcagcatttatgagttttccaaaatatagaaagcagtaggtcagtaggagcaaactagccaacaggtactgtctttgaatttactactgtaagactaagcagtgttactggacacagttttaacttgttcaatctgcttcaaaaacaagaaaaacaacaactatgagttatcaaaatattgactccatttatgactagactacatttctgaaagatctttggtttacgattcttaagaatattgacaatacctataaaactttgaagataacttttacttaaatatgaaaattatagtttgaaaattaggctcaagcaaatatcaaatactgcaaaaatccccttgtcccaggataccctaaaatagaagtatattttgatgtttgtttattctacctcaaacagaggcttaagttttgaagtgtaaccagtttatacttcattttatacaaaacttattgctgagaagtctgaatattgtgctttttgttgtttgtaaatagaattgaatttaaatacaccaggataaatcttatttaaaggaagcctgtttgaaaatcaccaactttaacttattgcttatataaatccaagctctgtacctgatctttatgtaaagcaagattcatatgtgtagtatctaatgccctttggtgttacatttgactaaaatacaaatgtctgtatt

SEQ ID NO: 256 - DNA, 771 bp, Homo sapiens
atgccggcccgttgtgtggccgcccactgcggcaacaccaccaagtctgggaagtcgctgttccgctttcccaaggaccgggccgtgcggctgctctgggaccgcttcgtgcggggttgccgcgccgactggtacggaggcaatgaccgctcggtcatctgctctgaccactttgccccagcctgttttgacgtctcttcggttatccagaagaacctgcgcttctcccagcgcctgaggctggtggcaggcgccgtgcccaccctgcaccgggtgcccgccccggcacctaagaggggagaggagggagaccaagcaggccgcctggacacgcgaggagagctccaggcagccaggcattctgaggctgccccaggtccagtctcctgtacacgcccccgagctgggaagcaggctgcagcttcacagattacgtgtgaaaatgaacttgtgcaaacccaaccccatgctgataatccatctaatactgtcacttcagtacctactcactgtgaagaaggcccagtgcataaaagtacacaaatttctttgaaaaggccccgtcaccgtagtgtgggtattcaagccaaagtgaaagcgtttggaaaaagactgtgtaatgcaactactcagacagaggaattgtggtctagaacttcctctctctttgacatttactccagtgattcagaaacagatacagactgggatatcaagagtgaacagagtgatttgtcttatatggctgtacaggtgaaagaagaaacatgt

SEQ ID NO: 257 - DNA, 942 bp, Homo sapiens
atgcctggctttacgtgctgcgtgccaggctgctacaacaactcgcaccgggacaaggcgctgcacttctacacgtttccaaaggacgctgagttgcggcgcctctggctcaagaacgtgtcgcgtgccggcgtcagtgggtgcttctccaccttccagcccaccacaggccaccgtctctgcagcgttcacttccagggcggccgcaagacctacacggtacgcgtccccaccatcttcccgctgcgcggcgtcaatgagcgcaaagtagcgcgcagacccgctggggccgcggccgcccgccgcaggcagcagcagcaacagcagcagcagcagcaacagcagcaacagcagcagcagcagcaacagcagcagcagcagcagcagcagcagcagtcctcaccctctgcctccactgcccagactgcccagctgcagccgaacctggtatctgcttccgcggccgtgcttctcacccttcaggccactgtagacagcagtcaggctccgggatccgtacagccggcgcccatcactcccactggagaagacgtgaagcccatcgatctcacagtgcaagtggagtttgcagccgcagagggcgcagccgctgcggccgccgcgtcggagttacaggctgctaccgcagggctggaggctgccgagtgccctatgggcccccagttggtggtggtaggggaagagggcttccctgatactggctccgaccattcgtactccttgtcgtcaggcaccacggaggaggagctcctgcgcaagctgaatgagcagcgggacatcctggctctgatggaagtgaagatgaaagagatgaaaggcagcattcgccacctgcgtctcactgaggccaagctgcgcgaagaactgcgtgagaaggatcggctgcttgccatggctgtcatccgcaagaagcacggaatg

SEQ ID NO: 258 - DNA, 2283 bp, Homo sapiens
atgccgaacttctgcgctgcccccaactgcacgcggaagagcacgcagtccgacttggccttcttcaggttcccgcgggaccctgccagatgccagaagtgggtggagaactgtaggagagcagacttagaagataaaacacctgatcagctaaataaacattatcgattatgtgccaaacattttgagacctctatgatctgtagaactagtccttataggacagttcttcgagataatgcaataccaacaatatttgatcttaccagtcatttgaacaacccacatagtagacacagaaaacgaataaaagaactgagtgaagatgaaatcaggacactgaaacagaaaaaaattgatgaaacttctgagcaggaacaaaaacataaagaaaccaacaatagcaatgctcagaaccccagcgaagaagagggtgaagggcaagatgaggacattttacctctaacccttgaagagaaggaaaacaaagaatacctaaaatctctatttgaaatcttgattctgatgggaaagcaaaacatacctctggatggacatgaggctgatgaaatcccagaaggtctctttactccagataactttcaggcactgctggagtgtcggataaattctggtgaagaggttctgagaaagcggtttgagacaacagcagttaacacgttgttttgttcaaaaacacagcagaggcagatgctagagatctgtgagagctgtattcgagaagaaactctcagggaagtgagagactcacacttcttttccattatcactgacgatgtagtggacatagcaggggaagagcacctacctgtgttggtgaggtttgttgatgaatctcataacctaagagaggaatttataggcttcctgccttatgaagccgatgcagaaattttggctgtgaaatttcacactatgataactgagaagtggggattaaatatggagtattgtcgtggccaggcttacattgtctctagtggattttcttccaaaatgaaagttgttgcttctagacttttagagaaatatccccaagctatctacacactctgctcttcctgtgccttaaatatgtggttggcaaaatcagtacctgttatgggagtatctgttgcattaggaacaattgaggaagtttgttcttttttccatcgatcaccacaactgcttttagaacttgacaacgtaatttctgttctttttcagaacagtaaagaaaggggtaaagaactgaaggaaatctgccattctcagtggacaggcaggcatgatgcttttgaaattttagtggaactcctgcaagcacttgttttatgtttagatggtataaatagtgacacaaatattagatggaataactatatagctggccgagcatttgtactctgcagtgcagtgtcagattttgatttcattgttactattgttgttcttaaaaatgtcctatcttttacaagagcctttgggaaaaacctccaggggcaaacctctgatgtcttctttgcggccggtagcttgactgcagtactgcattcactcaacgaagtgatggaaaatattgaagtttatcatgaattttggtttgaggaagccacaaatttggcaaccaaacttgatattcaaatgaaactccctgggaaattccgcagagctcaccagggtaacttggaatctcagctaacctctgagagttactataaagaaaccctaagtgtcccaacagtggagcacattattcaggaacttaaagatatattctcagaacagcacctcaaagctcttaaatgcttatctctggtaccctcagtcatgggacaactcaaattcaatacgtcggaggaacaccatgctgacatgtatagaagtgacttacccaatcctgacacgctgtcagctgagcttcattgttggagaatcaaatggaaacacagggggaaagatatagagcttccgtccaccatctatgaagccctccacctgcctgacatcaagttttttcctaatgtgtatgcattgctgaaggtcctgtgtattcttcctgtgatgaaggttgagaatgagcggtatgaaaatggacgaaagcgtcttaaagcatatttgaggaacactttgacagaccaaaggtcaagtaacttggctttgcttaacataaattttgatataaaacacgacctggatttaatggtggacacatatattaaactctatacaagtaagtcagagcttcctacagataattccgaaactgtggaaaatacc

SEQ ID NO: 259 - DNA, 986 bp, Mus musculus
cttctgctaaagcaaaccccacaacggacagggtagtcactcgcccaccccaacccccaccccacggcgaggtgatcgtccccgtaactgctgaccgacgccaccgagagcggcgagcgttatcaaggccgagcgcgggaccccgacggcccccttcgcctgcctcccgggccgaaggagagtgtggagggccagaaggatggtgcagtcctgctccgcctacggctgcaagaaccgctacgacaaggacaagcccgtctccttccacaagtttcctcttactcgccccagcctttgtaagcagtgggaggcagctgttaaaaggaaaaacttcaagcccaccaagtacagcagcatctgctcggagcacttcaccccggactgctttaagagggagtgcaacaacaagctactgaaggagaacgctgtgcccacaatatttctctatatcgagccacatgagaagaaggaagacctggaatcccaagaacagctcccctctccttcaccccccgcttcccaggttgatgctgctattgggctgctaatgccccctctgcagacccctgataacctgtcggttttctgtgaccacaattacactgtggaggatacgatgcaccagaggaagaggatcctgcagctggagcagcaggtggagaaactcaggaagaagctcaagacggcccagcagcggtgccggcggcaggagaggcagctcgagaagctcaaggaagtcgtccactttcagagagagaaggacgacgcgtccgagaggggctacgtgatcctaccaaatgactactttgaaattgttgaagttccagcatgaaaaaatgagatgtgttagtgggacaagactatacaccttcttttagcctacatacaggagttcatttgaaaaaataacacttaattacttgtattaaaaaaacaatatttttttaaaataaattagatatatactgtaaaaaaaaaaaaaaaaa

SEQ ID NO: 260 - DNA, 1515 bp, Mus musculus
gctctgccctccccgcgctctgcaccgagctggcggcgcggggtcgcctgcctcgtttgtctagcgtttgacagaagcttgcttagcgggcagcgcctccgaagtggcgtaaggtggcgccgaatgaggggcccggggaaatgccgaccaattgcgccgcggcgggctgtgctgctacctacaacaagcacattaacatcagcttccacaggtttcctttggatcctaaaagaagaaaagaatgggttcgcctggttaggcgcaaaaattttgtgccaggaaaacacacttttctttgctcaaagcactttgaagcctcctgttttgatctaacaggacaaacccgacgacttaaaatggatgctgttccaaccatttttgatttttgtacccatataaagtctctgaaactcaagtcaaggaatcttctgaagacaaacaacagttttcctccaactggaccatgtaatttaaagctgaacggcagtcagcaagtactgcttgaacacagttatgcctttaggaaccctatggaggcgaaaaaaaggataattaaactagaaaaggaaatagcaagcttgagaaaaaaaatgaaaacttgcctgcaaagagaacgcagagcaactcgaaggtggatcaaagccacgtgctttgtgaagagcttagaagcaagtaacatgctacctaagggcatctcagaacagattttaccaactgccttaagcaatcttcctctggaagatttaaaaagtcttgaacaagatcaacaagataaaacagtacccattctctaaatgtaaaatggaagagactctctgcactcaagttttcctcacacagaacccagtgcccagctcctgccgtccccacccaccgcactctgacagttacactacaatcaagtcctgcagttttacttgaagtagtagtgtcagtgtcactctctggagactgaggaagtgggaaatccaatgacaagcttgacaccgagcagaagtgccttacatgagggtcacggacttaggaaacactgccagcagggtttctgctcttgtttttttaagctgctgtcaaataggaatgacaagtgatatgttcataaaagtaaaagcattccgcaccaaagctgggatattacattctaaagaacatgtgaagtaggagctaactgcattaaatatgatcttaaaactactaatgtattttgtatgaattaaattattgggattgtggttgaaaattttatagaataaaacctctggggtacggggcaaggtttgtttctttgttttgttttgttttttgtcttttttagccttttgtattttaactagtaaaagtaaacttatcatggcctttttttataagaacattgaatttaaaagtaggttgtaaaataatctgaaatagtattttgaatgtgaaatacctttgaaactccaaactaggtaaggccccaagcacctcagactgggaaaacccagtgagttatagtcaacgtctaagaaaatatac

SEQ ID NO: 261 - DNA, 1120 bp, Mus musculus
gaggggcagtgggcccatctccgagatgccgaagtcttgcgcggcccggcaatgctgcaaccgctacagcagccgcaggaagcagctcaccttccaccggttccccttcagccgcccggagctgttgagggagtgggtgctcaacatcggccgggctgacttcaagcctaagcagcacacagtcatctgctcggaacacttcagacccgagtgcttcagcgcctttgggaaccgcaagaacctgaaacacaatgctgtgcccacggtgttcgcttttcagaaccccacagaggtctgccctgaggtgggggctggtggggacagctcagggaggaacatggacaccacactggaagaacttcagcctccaaccccggaaggccccgtgcagcaggtcttaccagatcgagaagcaatggaggccacggaggccgctggcctgcctgccagccctctggggttgaagaggccccttccgggacagccgtctgatcacagttatgccctttcggacttggataccctcaaaaaaaaactctttctcacactgaaggaaaacaagaggcttcggaagcggctgaaagcccagaggctgctgttgcggaggacatgtggccgcctgagagcctacagagagggacagccgggacctcgggccagacggccggcacagggaagctgagcctgagcaagctctgggatgtgggggtggtggcaacaccttagcaggaagtggtgttctggcctgctatgggcgtttctacccgctgctgatgctgcaggtgccttgagagtgggatgggatgctgcgacaggcagttgtcgggtgggggcccaagtactgcggaggcaccgtcccaggtttcttgggctgaggctgtcagctgtggggaagcagcagtgaccaaatgtgagccgtcacaaccccctcaagagatgctcccagagggagagctggtcattcttacagccggtggggtccttactgtctccccataggagccattctgatggcaggcagggcaagggtccccgtcagcctgtatttctgagtgactcttttttctgcctggttcgtgtagatgtggaataaatcttttgaagtctccaaaaaaaaaaa

SEQ ID NO: 262 - DNA, 558 bp, Mus musculus; identical to SEQ ID NO: 175

SEQ ID NO: 263 - protein, 37 aa, Artificial Sequence
  Consensus sequence for PAR4 binding domain of THAP
  UNSURE 3-15, 18, 22, 24-34, 36: Xaa = any of the twenty amino acids
LEXXXXXXXXXXXXXQRXRRQXRXXXXXXXXXXXQXE

SEQ ID NO: 264 - DNA, 22 bp, Artificial Sequence
  Primer
ccgctcgaggtgcagtcctgct

SEQ ID NO: 265 - DNA, 29 bp, Artificial Sequence
  Primer
cgggatccgctggtacttcaactatttca

SEQ ID NO: 266 - DNA, 22 bp, Artificial Sequence
  Primer
ccgctcgaggatacaatgcacc

SEQ ID NO: 267 - DNA, 33 bp, Artificial Sequence
  Primer
gcgggatccgctggtacttcaactatttcaaag

SEQ ID NO: 268 - DNA, 86 bp, Artificial Sequence
  Synthetic Oligonucleotide
ccgctcgagccaccatggagacagacacactcctgctatgggtactgctgctctgggttccaggttccactggtgacctcgagatt

SEQ ID NO: 269 - DNA, 26 bp, Artificial Sequence
  Primer
tagggtcgacgccaccatggagacag

SEQ ID NO: 270 - DNA, 21 bp, Artificial Sequence
  Primer
ccgctcgaggtcaccagtgga

SEQ ID NO: 271 - protein, 134 aa, Homo sapiens; identical to SEQ ID NO: 119

SEQ ID NO: 272 - DNA, 878 bp, Homo sapiens; identical to SEQ ID NO: 177

SEQ ID NO: 273 - protein, 98 aa, Homo sapiens
MALLLALSLLVLWTSPAPTLSGTNDAEDCCLSVTQKPIPGYIVRNFHYLLIKDGCRVPAVVFTTLRGRQLCAPPDQPWVERIIQRLQRTSAKMKRRSS

SEQ ID NO: 274 - DNA, 684 bp, Homo sapiens
cattcccagcctcacatcactcacaccttgcatttcacccctgcatcccagtcgccctgcagcctcacacagatcctgcacacacccagacagctggcgctcacacattcaccgttggcctgcctctgttcaccctccatggccctgctactggccctcagcctgctggttctctggacttccccagccccaactctgagtggcaccaatgatgctgaagactgctgcctgtctgtgacccagaaacccatccctgggtacatcgtgaggaacttccactaccttctcatcaaggatggctgcagggtgcctgctgtagtgttcaccacactgaggggccgccagctctgtgcacccccagaccagccctgggtagaacgcatcatccagagactgcagaggacctcagccaagatgaagcgccgcagcagttaacctatgaccgtgcagagggagcccggagtccgagtcaagcattgtgaattattacctaacctggggaaccgaggaccagaaggaaggaccaggcttccagctcctctgcaccagacctgaccagccaggacagggcctggggtgtgtgtgagtgtgagtgtgagcgagagggtgagtgtggtcagagtaaagctgctccacccccagattgcaatgctaccaataaagccgcctggtgtttacaactaa

SEQ ID NO: 275 - protein, 125 aa, Homo sapiens
MKKSGVLFLLGIILLVLIGVQGTPVVRKGRCSCISTNQGTIHLQSLKDLKQFAPSPSCEKIEIIATLKNGVQTCLNPDSADVKELIKKWEKQVSQKKKQKNGKKHQKKKVLKVRKSQRSRQKKTT

SEQ ID NO: 276 - DNA, 2545 bp, Homo sapiens
atccaatacaggagtgacttggaactccattctatcactatgaagaaaagtggtgttcttttcctcttgggcatcatcttgctggttctgattggagtgcaaggaaccccagtagtgagaaagggtcgctgttcctgcatcagcaccaaccaagggactatccacctacaatccttgaaagaccttaaacaatttgccccaagcccttcctgcgagaaaattgaaatcattgctacactgaagaatggagttcaaacatgtctaaacccagattcagcagatgtgaaggaactgattaaaaagtgggagaaacaggtcagccaaaagaaaaagcaaaagaatgggaaaaaacatcaaaaaaagaaagttctgaaagttcgaaaatctcaacgttctcgtcaaaagaagactacataagagaccacttcaccaataagtattctgtgttaaaaatgttctattttaattataccgctatcattccaaaggaggatggcatataatacaaaggcttattaatttgactagaaaatttaaaacattactctgaaattgtaactaaagttagaaagttgattttaagaatccaaacgttaagaattgttaaaggctatgattgtctttgttcttctaccacccaccagttgaatttcatcatgcttaaggccatgattttagcaatacccatgtctacacagatgttcacccaaccacatcccactcacaacagctgcctggaagagcagccctaggcttccacgtactgcagcctccagagagtatctgaggcacatgtcagcaagtcctaagcctgttagcatgctggtgagccaagcagtttgaaattgagctggacctcaccaagctgctgtggccatcaacctctgtatttgaatcagcctacaggcctcacacacaatgtgtctgagagattcatgctgattgttattgggtatcaccactggagatcaccagtgtgtggctttcagagcctcctttctggctttggaagccatgtgattccatcttgcccgctcaggctgaccactttatttctttttgttcccctttgcttcattcaagtcagctcttctccatcctaccacaatgcagtgcctttcttctctccagtgcacctgtcatatgctctgatttatctgagtcaactcctttctcatcttgtccccaacaccccacagaagtgctttcttctcccaattcatcctcactcagtccagcttagttcaagtcctgcctcttaaataaacctttttggacacacaaattatcttaaaactcctgtttcacttggttcagtaccacatgggtgaacactcaatggttaactaattcttgggtgtttatcctatctctccaaccagattgtcagctccttgagggcaagagccacagtatatttccctgtttcttccacagtgcctaataatactgtggaactaggttttaataattttttaattgatgttgttatgggcaggatggcaaccagaccattgtctcagagcaggtgctggctctttcctggctactccatgttggctagcctctggtaacctcttacttattatcttcaggacactcactacagggaccagggatgatgcaacatccttgtctttttatgacaggatgtttgctcagcttctccaacaataagaagcacgtggtaaaacacttgcggatattctggactgtttttaaaaaatatacagtttaccgaaaatcatataatcttacaatgaaaaggactttatagatcagccagtgaccaaccttttcccaaccatacaaaaattccttttcccgaaggaaaagggctttctcaataagcctcagctttctaagatctaacaagatagccaccgagatccttatcgaaactcattttaggcaaatatgagttttattgtccgtttacttgtttcagagtttgtattgtgattatcaattaccacaccatctcccatgaagaaagggaacggtgaagtactaagcgctagaggaagcagccaagtcggttagtggaagcatgattggtgcccagttagcctctgcaggatgtggaaacctccttccaggggaggttcagtgaattgtgtaggagaggttgtctgtggccagaatttaaacctatactcactttcccaaattgaatcactgctcacactgctgatgatttagagtgctgtccggtggagatcccacccgaacgtcttatctaatcatgaaactccctagttccttcatgtaacttccctgaaaaatctaagtgtttcataaatttgagagtctgtgacccacttaccttgcatctcacaggtagacagtatataactaacaaccaaagactacatattgtcactgacacacacgttataatcatttatcatatatatacatacatgcatacactctcaaagcaaataatttttcacttcaaaacagtattgacttgtataccttgtaatttgaaatattttctttgttaaaatagaatggtatcaataaatagaccattaatcag

SEQ ID NO: 277 - protein, 98 aa, Homo sapiens
MNQTAILICCLIFLTLSGIQGVPLSRTVRCTCISISNQPVNPRSLEKLEIIPASQFCPRVEIIATMKKKGEKRCLNPESKAIKNLLKAVSKEMSKRSP

SEQ ID NO: 278 - DNA, 1172 bp, Homo sapiens
gagacattcctcaattgcttagacatattctgagcctacagcagaggaacctccagtctcagcaccatgaatcaaactgcgattctgatttgctgccttatctttctgactctaagtggcattcaaggagtacctctctctagaaccgtacgctgtacctgcatcagcattagtaatcaacctgttaatccaaggtctttagaaaaacttgaaattattcctgcaagccaattttgtccacgtgttgagatcattgctacaatgaaaaagaagggtgagaagagatgtctgaatccagaatcgaaggccatcaagaatttactgaaagcagttagcaaggaaatgtctaaaagatctccttaaaaccagaggggagcaaaatcgatgcagtgcttccaaggatggaccacacagaggctgcctctcccatcacttccctacatggagtatatgtcaagccataattgttcttagtttgcagttacactaaaaggtgaccaatgatggtcaccaaatcagctgctactactcctgtaggaaggttaatgttcatcatcctaagctattcagtaataactctaccctggcactataatgtaagctctactgaggtgctatgttcttagtggatgttctgaccctgcttcaaatatttccctcacctttcccatcttccaagggtactaaggaatctttctgctttggggtttatcagaattctcagaatctcaaataactaaaaggtatgcaatcaaatctgctttttaaagaatgctctttacttcatggacttccactgccatcctcccaaggggcccaaattctttcagtggctacctacatacaattccaaacacatacaggaaggtagaaatatctgaaaatgtatgtgtaagtattcttatttaatgaaagactgtacaaagtataagtcttagatgtatatatttcctatattgttttcagtgtacatggaataacatgtaattaagtactatgtatcaatgagtaacaggaaaattttaaaaatacagatagatatatgctctgcatgttacataagataaatgtgctgaatggttttcaaataaaaatgaggtactctcctggaaatattaagaaagactatctaaatgttgaaagatcaaaaggttaataaagtaattataact

SEQ ID NO: 279 - protein, 166 aa, Homo sapiens
MKYTSYILAFQLCIVLGSLGCYCQDPYVKEAENLKKYFNAGHSDVADNGTLFLGILKNWKEESDRKIMQSQIVSFYFKLFKNFKDDQSIQKSVETIKEDMNVKFFNSNKKKRDDFEKLTNYSVTDLNVQRKAIHELIQVMAELSPAAKTGKRKRSQMLFQGRRASQ

SEQ ID NO: 280 - DNA, 1193 bp, Homo sapiens
tgaagatcagctattagaagagaaagatcagttaagtcctttggacctgatcagcttgatacaagaactactgatttcaacttctttggcttaattctctcggaaacgatgaaatatacaagttatatcttggcttttcagctctgcatcgttttgggttctcttggctgttactgccaggacccatatgtaaaagaagcagaaaaccttaagaaatattttaatgcaggtcattcagatgtagcggataatggaactcttttcttaggcattttgaagaattggaaagaggagagtgacagaaaaataatgcagagccaaattgtctccttttacttcaaactttttaaaaactttaaagatgaccagagcatccaaaagagtgtggagaccatcaaggaagacatgaatgtcaagtttttcaatagcaacaaaaagaaacgagatgacttcgaaaagctgactaattattcggtaactgacttgaatgtccaacgcaaagcaatacatgaactcatccaagtgatggctgaactgtcgccagcagctaaaacagggaagcgaaaaaggagtcagatgctgtttcaaggtcgaagagcatcccagtaatggttgtcctgcctgcaatatttgaattttaaatctaaatctatttattaatatttaacattatttatatggggaatatatttttagactcatcaatcaaataagtatttataatagcaacttttgtgtaatgaaaatgaatatctattaatatatgtattatttataattcctatatcctgtgactgtctcacttaatcctttgttttctgactaattaggcaaggctatgtgattacaaggctttatctcaggggccaactaggcagccaacctaagcaagatcccatgggttgtgtgtttatttcacttgatgatacaatgaacacttataagtgaagtgatactatccagttactgccggtttgaaaatatgcctgcaatctgagccagtgctttaatggcatgtcagacagaacttgaatgtgtcaggtgaccctgatgaaaacatagcatctcaggagatttcatgcctggtgcttccaaatattgttgacaactgtgactgtacccaaatggaaagtaactcatttgttaaaattatcaatatctaatatatatgaataaagtgtaagttcacaact

SEQ ID NO: 281 - DNA, 34 bp, Artificial Sequence
  Primer
gcggaatcatgggcaccaatgatgctgaagactg

SEQ ID NO: 282 - DNA, 34 bp, Artificial Sequence
  Primer
gcgggatccttaactgctgcggcgcttcatcttg

SEQ ID NO: 283 - DNA, 35 bp, Artificial Sequence
  Primer
gccgaattcaccccagtagtgagaaagggtcgctg

SEQ ID NO: 284 - DNA, 39 bp, Artificial Sequence
  Primer
cgcggatccttatgtagtcttcttttgacgagaacgttg

SEQ ID NO: 285 - DNA, 36 bp, Artificial Sequence
  Primer
gccgaattcgtacctctctctagaaccgtacgctgt

SEQ ID NO: 286 - DNA, 40 bp, Artificial Sequence
  Primer
gcgggatccttaaggagatcttttagacatttccttgcta

SEQ ID NO: 287 - DNA, 33 bp, Artificial Sequence
  Primer
gcggaatcatgtgttactgccaggacccatatg

SEQ ID NO: 288 - DNA, 33 bp, Artificial Sequence
  Primer
gcgggatccttactgggatgctcttcgaccttg

SEQ ID NO: 289 - protein, 91 aa, Homo sapiens
MKVSAAALAVILIATALCAPASASPYSSDTTPCCFAYIARPLPRAHIKEYFYTSGKCSNPAVVFVTRKNRQVCANPEKKWVREYINSLEMS

SEQ ID NO: 290 - DNA, 1237 bp, Homo sapiens
gctgcagaggattcctgcagaggatcaagacagcacgtggacctcgcacagcctctcccacaggtaccatgaaggtctccgcggcagccctcgctgtcatcctcattgctactgccctctgcgctcctgcatctgcctccccatattcctcggacaccacaccctgctgctttgcctacattgcccgcccactgccccgtgcccacatcaaggagtatttctacaccagtggcaagtgctccaacccagcagtcgtctttgtcacccgaaagaaccgccaagtgtgtgccaacccagagaagaaatgggttcgggagtacatcaactctttggagatgagctaggatggagagtccttgaacctgaacttacacaaatttgcctgtttctgcttgctcttgtcctagcttgggaggcttcccctcactatcctaccccacccgctccttgaagggcccagattctaccacacagcagcagttacaaaaaccttccccaggctggacgtggtggctcacgcctgtaatcccagcactttgggaggccaaggtgggtggatcacttgaggtcaggagttcgagaccagcctggccaacatgatgaaaccccatctctactaaaaatacaaaaaattagccgggcgtggtagcgggcgcctgtagtcccagctactcgggaggctgaggcaggagaatggcgtgaacccgggaggcggagcttgcagtgagccgagatcgcgccactgcactccagcctgggcgacagagcgagactccgtctcaaaaaaaaaaaaaaaaaaaaaaatacaaaaattagccgggcgtggtggcccacgcctgtaatcccagctactcgggaggctaaggcaggaaaattgtttgaacccaggaggtggaggctgcagtgagctgagattgtgccacttcactccagcctgggtgacaaagtgagactccgtcacaacaacaacaacaaaaagcttccccaactaaagcctagaagagcttctgaggcgctgctttgtcaaaaggaagtctctaggttctgagctctggctttgccttggctttgccagggctctgtgaccaggaaggaagtcagcatgcctctagaggcaaggaggggaggaacactgcactcttaagcttccgccgtctcaacccctcacaggagcttactggcaaacatgaaaaatcggcttaccattaaagttctcaatgcaaccataaaaaaaaaa

SEQ ID NO: 291 - DNA, 33 bp, Artificial Sequence; identical to SEQ ID NO: 214
  Primer

SEQ ID NO: 292 - DNA, 39 bp, Artificial Sequence; identical to SEQ ID NO: 215
  Primer

SEQ ID NO: 293 - protein, 16 aa, Artificial Sequence
  THAP antigenic peptide
AVRRKNFKPTKYSSIC

SEQ ID NO: 294 - protein, 16 aa, Artificial Sequence
  Control peptide
QVEKLRKKLKTAQQRC

SEQ ID NO: 295 - DNA, 33 bp, Artificial Sequence; identical to SEQ ID NO: 185
  Primer

SEQ ID NO: 296 - DNA, 41 bp, Artificial Sequence; identical to SEQ ID NO: 235
  Primer

SEQ ID NO: 297 - DNA, 38 bp, Artificial Sequence
  Primer
gcgtctagaatgagtgatggaggggctcaggactgttg

SEQ ID NO: 298 - DNA, 38 bp, Artificial Sequence
  Primer
gggcggccgcctatggccctttaggggtctgtgaccgc

SEQ ID NO: 299 - DNA, 35 bp, Artificial Sequence
  Primer
gcgctcgagctgcacctgggccttctctgccctgg

SEQ ID NO: 300 - DNA, 35 bp, Artificial Sequence
  Primer
cgaagcttactgtgctccttttatctctgcccaag

SEQ ID NO: 301 - DNA, 420 bp, Homo sapiens
cttctctgccctgggccaagcctgcccgagcctctctgtcctctgcctgcccagctggacatctctgggcctctctggagaccagtggggtgggctgtgggggcgtcatattgccctggcttggcatccctcttgtggctgtacccctcccagcagccccaggactagcaagtccccgagatgggggtggggacagtggttgatgccaaaggttgtgggggcaggggcggggcaggagcaggaaggtcccctgagttccctcaccttgggcagagataaaaggagcacagttccaggcggggctgagctagggcgtagctgtgatttcaggggcacctctggcggctgccgtgatttgagaatctcgggtctcttggctgactgatcctgggagactgtggatgaataatgctggtgagt

SEQ ID NO: 302 - protein, 378 aa, Homo sapiens
MDLGKPMKSVLVVALLVIFQVCLCQDEVTDDYIGDNTTVDYTLFESLCSKKDVRNFKAWFLPIMYSIICFVGLLGNGLVVLTYIYFKRLKTMTDTYLLNLAVADILFLLTLPFWAYSAAKSWVFGVHFCKLIFAIYKMSFFSGMLLLLCISIDRYVAIVQAVSAHRHRARVLLISKLSCVGIWILATVLSIPELLYSDLQRSSSEQAMRCSLITEHVEAFITIQVAQMVIGFLVPLLAMSFCYLVIIRTLLQARNFERNKAIKVIIAVVVVFIVFQLPYNGVVLAQTVANFNITSSTCELSKQLNIAYDVTYSLACVRCCVNPFLYAFIGVKFRNDLFKLFKDLGCLSQEQLRQWSSCRHIRRSSMSVEAETTTTFSP

SEQ ID NO: 303 - DNA, 1136 bp, Homo sapiens
atggacctggggaaaccaatgaaaagcgtgctggtggtggctctccttgtcattttccaggtatgcctgtgtcaagatgaggtcacggacgattacatcggagacaacaccacagtggatacactttgttcgagtctttgtgctccaagaaggacgtgcggaactttaaagcctggttcctccctatcatgtactccatcatttgtttcgtgggcctactgggcaatgggctggtcgtgttgacctatatctatttcaagaggctcaagaccatgaccgatacctacctgctcaacctggcggtggcagacatcctcttcctcctgacccttcccttctgggcctacagcgcggccaagtcctgggtcttcggtgtccacttttgcaagctcatctttgccatctacaagatgagcttcttcagtggcatgctcctacttctttgcatcagcattgaccgctacgtggccatcgtccaggctgtctcagctcaccgccaccgtgcccgcgtccttctcatcagcaagctgtcctgtgtgggcatctggatactagccacagtgctctccatcccagagctcctgtacagtgacctccagaggagcagcagtgagcaagcgatgcgatgctctctcatcacagagcatgtggaggcctttatcaccatccaggtggcccagatggtgatcggctttctggtccccctgctggccatgagcttctgttaccttgtcatcatccgcaccctgctccaggcacgcaactttgagcgcaacaaggccatcaaggtgatcatcgctgtggtcgtggtcttcatagtcttccagctgccctacaatggggtggtcctggcccagacggtggccaacttcaacatcaccagtagcacctgtgagctcagtaagcaactcaacatcgcctacgacgtcacctacagcctggcctgcgtccgctgctgcgtcaaccctttcttgtacgccttcatcggcgtcaagttccgcaacgatctcttcaagctcttcaaggacctgggctgcctcagccaggagcagctccggcagtggtcttcctgtcggcacatccggcgctcctccatgagtgtggaggccgagaccaccaccaccttctccccatag

SEQ ID NO: 304 - protein, 368 aa, Homo sapiens
MVLEVSDHQVLNDAEVAALLENFSSSYDYGENESDSCCTSPPCPQDFSLNFDRAFLPALYSLLFLLGLLGNGAVAAVLLSRRTALSSTDTFLLHLAVADTLLVLTLPLWAVDAAVQWVFGSGLCKVAGALFNINFYAGALLLACISFDRYLNIVHATQLYRRGPPARVTLTCLAVWGLCLLFALPDFIFLSAHHDERLNATHCQYNFPQVGRTALRVLQLVAGFLLPLLVMAYCYAHILAVLLVSRGQRRLRAMRLVVVVVVAFALCWTPYHLVVLVDILMDLGALARNCGRESRVDVAKSVTSGLGYMHCCLNPLLYAFVGVKFRERMWMLLLRLGCPNQRGLQRQPSSSRRDSSWSETSEASYSGL

SEQ ID NO: 305 - DNA, 1670 bp, Homo sapiens
ccaaccacaagcaccaaagcagaggggcaggcagcacaccacccagcagccagagcaccagcccagccatggtccttgaggtgagtgaccaccaagtgctaaatgacgccgaggttgccgccctcctggagaacttcagctcttcctatgactatggagaaaacgagagtgactcgtgctgtacctccccgccctgcccacaggacttcagcctgaacttcgaccgggccttcctgccagccctctacagcctcctctttctgctggggctgctgggcaacggcgcggtggcagccgtgctgctgagccggcggacagccctgagcagcaccgacaccttcctgctccacctagctgtagcagacacgctgctggtgctgacactgccgctctgggcagtggacgctgccgtccagtgggtctttggctctggcctctgcaaagtggcaggtgccctcttcaacatcaacttctacgcaggagccctcctgctggcctgcatcagctttgaccgctacctgaacatagttcatgccacccagctctaccgccgggggcccccggcccgcgtgaccctcacctgcctggctgtctgggggctctgcctgcttttcgccctcccagacttcatcttcctgtcggcccaccacgacgagcgcctcaacgccacccactgccaatacaacttcccacaggtgggccgcacggctctgcgggtgctgcagctggtggctggctttctgctgcccctgctggtcatggcctactgctatgcccacatcctggccgtgctgctggtttccaggggccagcggcgcctgcgggccatgcggctggtggtggtggtcgtggtggcctttgccctctgctggaccccctatcacctggtggtgctggtggacatcctcatggacctgggcgctttggcccgcaactgtggccgagaaagcagggtagacgtggccaagtcggtcacctcaggcctgggctacatgcactgctgcctcaacccgctgctctatgcctttgtaggggtcaagttccgggagcggatgtggatgctgctcttgcgcctgggctgccccaaccagagagggctccagaggcagccatcgtcttcccgccgggattcatcctggtctgagacctcagaggcctcctactcgggcttgtgaggccggaatccgggctcccctttcgcccacagtctgacttccccgcattccaggctcctccctccctctgccggctctggctctccccaatatcctcgctcccgggactcactggcagccccagcaccaccaggtctcccgggaagccaccctcccagctctgaggactgcaccattgctgctccttagctgccaagccccatcctgccgcccgaggtggctgcctggagccccactgcccttctcatttggaaactaaaacttcatcttccccaagtgcggggagtacaaggcatggcgtagagggtgctgccccatgaagccacagcccaggcctccagctcagcagtgactgtggccatggtccccaagacctctatatttgctcttttatttttatgtctaaaatcctgcttaaaacttttcaataaacaagatcgtcaggaccaaaaaaaaaaaaaaaaaaaaaaaaaaaaaaaaaaaaaaaaaaaaaaa

SEQ ID NO: 306 - DNA, 11 bp, Artificial Sequence
  THRE consensus sequence
  misc_feature (1)...(1): N=A or T
  misc_feature (2)...(2): N=G, C or A
  misc_feature (4)...(4): N= A or G
  misc_feature (5)...(5): N=T, C or A
  misc_feature (6)...(6): N= G or T
  misc_feature (11)...(11): N= A, T, G or C
nntnnnggcan

SEQ ID NO: 307 - DNA, 11 bp, Artificial Sequence
  THRE variant one
agtaagggcaa

SEQ ID NO: 308 - DNA, 11 bp, Artificial Sequence
  Mutant THRE
agtaatttcaa

SEQ ID NO: 309 - DNA, 11 bp, Artificial Sequence
  Mutant THRE
agtaaggtcaa

SEQ ID NO: 310 - DNA, 11 bp, Artificial Sequence
  Mutant THRE
agtaagtgcaa

SEQ ID NO: 311 - DNA, 11 bp, Artificial Sequence
  Mutant THRE
agtaagggcca

SEQ ID NO: 312 - DNA, 11 bp, Artificial Sequence
  Mutant THRE
agtaagggaaa

SEQ ID NO: 313 - DNA, 25 bp, Artificial Sequence
  Sequence containing THRE variant one
agcaagtaagggcaaactacttcat

SEQ ID NO: 314 - DNA, 25 bp, Artificial Sequence
  Sequence containing THRE mutant
agcaagtaatttcaaactacttcat

SEQ ID NO: 315 - DNA, 319 bp, Homo sapiens
cgtcgctgggtgcaccgcgaccacgggcagagccacgcggcgggaggactacaactcccggcacaccccgcgccgccccgcctctactcccagaaggccgcggggggtggaccgcctaagagggcgtgcgctcccgacatgccccgcggcgcgccattaaccgccagatttgaatcgcgggacccgttggcagaggtggcggcggcggcatgggtgccccgacgttgccccctgcctggcagccctttctcaaggaccaccgcatctctacattcaagaactggcccttcttggagggctgcgcctgcaccccggagcg

SEQ ID NO: 316 - DNA, 17 bp, Artificial Sequence
  DR-5-type element
  misc_feature (7)...(7): N=A, T, G, or C
  misc_feature (8)...(8): N=A, T, G, or C
  misc_feature (9)...(9): N=A, T, G, or C
  misc_feature (10)...(10): N=A, T, G, or C
gggcaannnnngggcac

SEQ ID NO: 317 - DNA, 600 bp, Homo sapiens
tggtgccgtgcgcctgtagtcccagctactcgggaggctgaggcagaagaatgcactccagcctgggcgacagagggatattccgtctcaaacaaacaaaaaatcactcgctgcgttttttattctgacatggtgcaggaaggtaaattcaagacaacttaggtactcagttttagaagtcgacaggacagaattacggaaacaaatttaagcgttcccccttttagctccaaatataatgtgttccagaaaggtaaccatctaggaaactccaaggctcagaccaccaccggatgcccacacttcaggagcatttatataacttcgtggttatgtcagagacgagaaaacccattgacaaccaaacccctaaacccgaacatccggcgcaagccgcacgcaggcgcagatttactagcgtcagagccgatggtcccgggaggtgggggtggggtggtggtggcctagccacttcccataatgccgcgttccggaagttattgctttccaggggtcactctggcttcgactccgtcgctctcaattcgtcaccaggaggaagacggagctggctgcccagcccaaaggcccatgagggga

SEQ ID NO: 318 - DNA, 11 bp, Artificial Sequence
  THRE-type element
agtgtgggcat

SEQ ID NO: 319 - DNA, 25 bp, Artificial Sequence
  Sequence containing THRE mutant
agcaagtaaggtcaaactacttcat

SEQ ID NO: 320 - DNA, 25 bp, Artificial Sequence
  Sequence containing THRE mutant
agcaagtaagtgcaaactacttcat

SEQ ID NO: 321 - DNA, 25 bp, Artificial Sequence
  Sequence containing THRE mutant
agcaagtaagggccaactacttcat

SEQ ID NO: 322 - DNA, 25 bp, Artificial Sequence
  Sequence containing THRE mutant
agcaagtaagggaaaactacttcat

SEQ ID NO: 323 - protein, 94 aa, Homo sapiens
MSVKGMAIALAVILCATVVQGFPMFKRGRCLCIGPGVKAVKVADIEKASIMYPSNNCDKIEVIITLKENKGQRCLNPKSKQARLIIKKVERKNF

SEQ ID NO: 324 - DNA, 1493 bp, Homo sapiens
ttcctttcatgttcagcatttctactccttccaagaagagcagcaaagctgaagtagcagcaacagcaccagcagcaacagcaaaaaacaaacatgagtgtgaagggcatggctatagccttggctgtgatattgtgtgctacagttgttcaaggcttccccatgttcaaaagaggacgctgtctttgcataggccctggggtaaaagcagtgaaagtggcagatattgagaaagcctccataatgtacccaagtaacaactgtgacaaaatagaagtgattattaccctgaaagaaaataaaggacaacgatgcctaaatcccaaatcgaagcaagcaaggcttataatcaaaaaagttgaaagaaagaatttttaaaaatatcaaaacatatgaagtcctggaaaagggcatctgaaaaacctagaacaagtttaactgtgactactgaaatgacaagaattctacagtaggaaactgagacttttctatggttttgtgactttcaacttttgtacagttatgtgaaggatgaaaggtgggtgaaaggaccaaaaacagaaatacagtcttcctgaatgaatgacaatcagaattccactgcccaaaggagtccagcaattaaatggatttctaggaaaagctaccttaagaaaggctggttaccatcggagtttacaaagtgctttcacgttcttacttgttgtattatacattcatgcatttctaggctagagaaccttctagatttgatgcttacaactattctgttgtgactatgagaacatttctgtctctagaagttatctgtctgtattgatctttatgctatattactatctgtggttacagtggagacattgacattattactggagtcaagcccttataagtcaaaagcatctatgtgtcgtaaagcattcctcaaacattttttcatgcaaatacacacttctttccccaaatatcatgtagcacatcaatatgtagggaaacattcttatgcatcatttggtttgttttataaccaattcattaaatgtaattcataaaatgtactatgaaaaaaattatacgctatgggatactggcaacagtgcacatatttcataaccaaattagcagcaccggtcttaatttgatgtttttcaacttttattcattgagatgttttgaagcaattaggatatgtgtgtttactgtactttttgttttgatccgtttgtataaatgatagcaatatcttggacacatttgaaatacaaaatgtttttgtctaccaaagaaaaatgttgaaaaataagcaaatgtatacctagcaatcacttttactttttgtaattctgtctcttagaaaaatacataatctaatcaatttctttgttcatgcctatatactgtaaaatttaggtatactcaagactagtttaaagaatcaaagtcatttttttctctaataaactaccacaacctttcttttttaaaaaaaaaaa

SEQ ID NO: 325 - DNA, 31 bp, Artificial Sequence
  Primer
ggggaattcttccccatgttcaaaagaggac

SEQ ID NO: 326 - DNA, 29 bp, Artificial Sequence
  Primer
ggggatccttaaaaattctttctttcaac

SEQ ID NO: 327 - DNA, 35 bp, Artificial Sequence
  Primer
ccgaattcccaccatgaagaaaagtggtgttcttt

SEQ ID NO: 328 - DNA, 35 bp, Artificial Sequence
  Primer
ccggatcctgtagtcttcttttgacgagaacgttg

SEQ ID NO: 329 - DNA, 34 bp, Artificial Sequence
  Primer
cctctagaccaccatggtccttgaggtgagtgac

SEQ ID NO: 330 - DNA, 32 bp, Artificial Sequence
  Primer
cccgcggccgctcacaagcccgagtaggaggc

SEQ ID NO: 331 - DNA, 34 bp, Artificial Sequence
  Primer
ggcattcaattgctcgagtttaaacgcggccgcg

SEQ ID NO: 332 - DNA, 38 bp, Artificial Sequence
  Primer
aatccgcggccgcgtttaaactcgagcaattgaatgcc

SEQ ID NO: 333 - DNA, 26 bp, Artificial Sequence
  Primer
atgaagtgccttttgtacttagcctt

SEQ ID NO: 334 - DNA, 33 bp, Artificial Sequence
  Primer
tcataaaaattaaaaactcaaatataattgagg

SEQ ID NO: 335 - DNA, 22 bp, Artificial Sequence
  Primer
atgggccagactgttaccactc

SEQ ID NO: 336 - DNA, 16 bp, Artificial Sequence
  Primer
ttagggggcctcgcgg

SEQ ID NO: 337 - DNA, 20 bp, Artificial Sequence
  Primer
atggtgcagtcctgctccgc

SEQ ID NO: 338 - DNA, 31 bp, Artificial Sequence
  Primer
gccaattgttatgctggtacttcaactattt

SEQ ID NO: 339 - DNA, 22 bp, Artificial Sequence
  Primer
atgagtgatggaggggctcagg

SEQ ID NO: 340 - DNA, 23 bp, Artificial Sequence
  Primer
ggaattcctatggccctttaggg

SEQ ID NO: 341 - DNA, 25 bp, Artificial Sequence
  Primer
atgaccccagtagtgagaaagggtc

SEQ ID NO: 342 - DNA, 31 bp, Artificial Sequence
  Primer
ggaattcttatgtagtcttcttttgacgaga

SEQ ID NO: 343 - protein, 142 aa, Homo sapiens
MGAPTLPPAWQPFLKDHRISTFKNWPFLEGCACTPERMAEAGFIHCPTENEPDLAQCFFCFKELEGWEPDDDPIEEHKKHSSGCAFLSVKKQFEELTLGEFLKLDRERAKNKIAKETNNKKKEFEETAKKVRRAIEQLAAMD

SEQ ID NO: 344 - DNA, 1619 bp, Homo sapiens
ccgccagatttgaatcgcgggacccgttggcagaggtggcggcggcggcatgggtgccccgacgttgccccctgcctggcagccctttctcaaggaccaccgcatctctacattcaagaactggcccttcttggagggctgcgcctgcaccccggagcggatggccgaggctggcttcatccactgccccactgagaacgagccagacttggcccagtgtttcttctgcttcaaggagctggaaggctgggagccagatgacgaccccatagaggaacataaaaagcattcgtccggttgcgctttcctttctgtcaagaagcagtttgaagaattaacccttggtgaatttttgaaactggacagagaaagagccaagaacaaaattgcaaaggaaaccaacaataagaagaaagaatttgaggaaactgcgaagaaagtgcgccgtgccatcgagcagctggctgccatggattgaggcctctggccggagctgcctggtcccagagtggctgcaccacttccagggtttattccctggtgccaccagccttcctgtgggccccttagcaatgtcttaggaaaggagatcaacattttcaaattagatgtttcaactgtgctcctgttttgtcttgaaagtggcaccagaggtgcttctgcctgtgcagcgggtgctgctggtaacagtggctgcttctctctctctctctcttttttgggggctcatttttgctgttttgattcccgggcttaccaggtgagaagtgagggaggaagaaggcagtgtcccttttgctagagctgacagctttgttcgcgtgggcagagccttccacagtgaatgtgtctggacctcatgttgttgaggctgtcacagtcctgagtgtggacttggcaggtgcctgttgaatctgagctgcaggttccttatctgtcacacctgtgcctcctcagaggacagtttttttgttgttgtgtttttttgttttttttttttggtagatgcatgacttgtgtgtgatgagagaatggagacagagtccctggctcctctactgtttaacaacatggctttcttattttgtttgaattgttaattcacagaatagcacaaactacaattaaaactaagcacaaagccattctaagtcattggggaaacggggtgaacttcaggtggatgaggagacagaatagagtgataggaagcgtctggcagatactccttttgccactgctgtgtgattagacaggcccagtgagccgcggggcacatgctggccgctcctccctcagaaaaaggcagtggcctaaatcctttttaaatgacttggctcgatgctgtgggggactggctgggctgctgcaggccgtgtgtctgtcagcccaaccttcacatctgtcacgttctccacacgggggagagacgcagtccgcccaggtccccgctttctttggaggcagcagctcccgcagggctgaagtctggcgtaagatgatggatttgattcgccctcctccctgtcatagagctgcagggtggattgttacagcttcgctggaaacctctggaggtcatctcggctgttcctgagaaataaaaagcctgtcatttc

SEQ ID NO: 345 - protein, 202 aa, Homo sapiens
MATLIYVDKENGEPGTRVVAKDGLKLGSGPSIKALDGRSQVSTPRFGKTFDAPPALPKATRKALGTVNRATEKSVKTKGPLKQKQPSFSAKKMTEKTVKAKSSVPASDDAYPEIEKFFPFNPLDFESFDLPEEHQIAHLPLSGVPLMILDEERELEKLFQLGPPSPVKMPSPPWESNLLQSPSSILSTLDVELPPVCCDIDI

SEQ ID NO: 346 - DNA, 727 bp, Homo sapiens
cggcctcagatgaatgcggctgttaagacctgcaataatccagaatggctactctgatctatgttgataaggaaaatggagaaccaggcacccgtgtggttgctaaggatgggctgaagctggggtctggaccttcaatcaaagccttagatgggagatctcaagtttcaacaccacgttttggcaaaacgttcgatgccccaccagccttacctaaagctactagaaaggctttgggaactgtcaacagagctacagaaaagtctgtaaagaccaagggacccctcaaacaaaaacagccaagcttttctgccaaaaagatgactgagaagactgttaaagcaaaaagctctgttcctgcctcagatgatgcctatccagaaatagaaaaattctttcccttcaatcctctagactttgagagttttgacctgcctgaagagcaccagattgcgcacctccccttgagtggagtgcctctcatgatccttgacgaggagagagagcttgaaaagctgtttcagctgggccccccttcacctgtgaagatgccctctccaccatgggaatccaatctgttgcagtctccttcaagcattctgtcgaccctggatgttgaattgccacctgtttgctgtgacatagatatttaaatttcttagtgcttcagagtttgtgtgtatttgtattaataaagcattcttcaacagaaaaaaaaaaaaaaaaa

SEQ ID NO: 347 - protein, 79 aa, Homo sapiens [sequence omitted]

SEQ ID NO: 348 - DNA, 717 bp, Homo sapiens
agagcgatcatgtcgcacaaacaaatttactattcggacaaatacgacgacgaggagtttgagtatcgacatgtcatgctgcccaaggacatagccaagctggtccctaaaacccatctgatgtctgaatctgaatggaggaatcttggcgttcagcagagtcagggatgggtccattatatgatccatgaaccagaacctcacatcttgctgttccggcgcccactacccaagaaaccaaagaaatgaagctggcaagctacttttcagcctcaagctttacacagctgtccttacttcctaacatctttctgataacattattatgttgccttcttgtttctcactttgatatttaaaagatgttcaatacactgtttgaatgtgctggtaactgctttgcttcttgagtagagccaccaccaccatagcccagccagatgagtgctctgtggacccacagcctaagctgagtgtgaccccagaagccacgatgtgctctgtatccagaacacacttggcagatggaggaagcatctgagtttgagaccatggctgttacagggatcatgtaaacttgctgtttttgttttttctgccgggtgttgtatgtgtggtgacttgcggatttatgtttcagtgtactggaaactttccattttattcaagaaatctgttcatgttaaaagccttgattaaagaggaagtttttataat

SEQ ID NO: 349 - protein, 205 aa, Homo sapiens
MALQLSREQGITLRGSAEIVAEFFSFGINSILYQRGIYPSETFTRVQKYGLTLLVTTDLELIKYLNNVVEQLKDWLYKCSVQKLVVVISNIESGEVLERWQFDIECDKTAKDDSAPREKSQKAIQDEIRSVIRQITATVTFLPLLEVSCSFDLLIYTDKDLVVPEKWEESGPQFITNSEEVRLRSFTTTIHKVNSMVAYKIPVND

SEQ ID NO: 350 - DNA, 1390 bp, Homo sapiens
gggaagtgctgttggagccgctgtggttgctgtccgcggagtggaagcgcgtgcttttgtttgtgtccctggccatggcgctgcagctctcccgggagcagggaatcaccctgcgcgggagcgccgaaatcgtggccgagttcttctcattcggcatcaacagcattttatatcagcgtggcatatatccatctgaaacctttactcgagtgcagaaatacggactcaccttgcttgtaactactgatcttgagctcataaaatacctaaataatgtggtggaacaactgaaagattggttatacaagtgttcagttcagaaactggttgtagttatctcaaatattgaaagtggtgaggtcctggaaagatggcagtttgatattgagtgtgacaagactgcaaaagatgacagtgcacccagagaaaagtctcagaaagctatccaggatgaaatccgttcagtgatcagacagatcacagctacggtgacatttctgccactgttggaagtttcttgttcatttgatctgctgatttatacagacaaagatttggttgtacctgaaaaatgggaagagtcgggaccacagtttattaccaattctgaggaagtccgccttcgttcatttactactacaatccacaaagtaaatagcatggtggcctacaaaattcctgtcaatgactgaggatgacatgaggaaaataatgtaattgtaattttgaaatgtggttttcctgaaatcaggtcatctatagttgatatgttttatttcattggttaatttttacatggagaaaaccaaaatgatacttactgaactgtgtgtaattgttcctttatttttttggtacctatttgacttaccatggagttaacatcatgaatttattgcacattgttcaaaaggaaccaggaggtttttttgtcaacattgtgatgtatattcctttgaagatagtaactgtagatggaaaaacttgtgctataaagctagatgctttcctaaatcagatgttttggtcaagtagtttgactcagtataggtagggagatatttaagtataaaatacaacaaaggaagtctaaatattcagaatctttgttaaggtcctgaaagtaactcataatctataaacaatgaaatattgctgtatagctccttttgaccttcatttcatgtatagttttccctattgaatcagtttccaattatttgactttaatttatgtaacttgaacctatgaagcaatggatatttgtactgtttaatgttctgtgatacagaactcttaaaaatgttttttcatgtgttttataaaatcaagttttaagtgaaagtgaggaaataaagttaagtttgttttaaaaaaaaaaaaaaaaaa

SEQ ID NO: 351 - protein, 823 aa, Homo sapiens
MGKKRTKGKTVPIDDSSETLEPVCRHIRKGLEQGNLKKALVNVEWNICQDCKTDNKVKDKAEEETEEKPSVWLCLKCGHQGCGRNSQEQHALKHYLTPRSEPHCLVLSLDNWSVWCYVCDNEVQYCSSNQLGQVVDYVRKQASITTPKPAEKDNGNIELENKKLEKESKNEQEREKKENMAKENPPMNSPCQITVKGLSNLGNTCFFNAVMQNLSQTPVLRELLKEVKMSGTIVKIEPPDLALTEPLEINLEPPGPLTLAMSQFLNEMQETKKGVVTPKELFSQVCKKAVRFKGYQQQDSQELLRYLLDGMRAEEHQRVSKGILKAFGNSTEKLDEELKNKVKDYEKKKSMPSFVDRIFGGELTSMIMCDQCRTVSLVHESFLDLSLPVLDDQSGKKSVNDKNLKKTVEDEDQDSEEEKDNDSYIKERSDIPSGTSKHLQKKAKKQAKKQAKNQRRQQKIQGKVLHLNDICTIDHPEDSEYEAEMSLQGEVNIKSNHISQEGVMHKEYCVNQKDLNGQAKMIESVTDNQKSTEEVDMKNINMDNDLEVLTSSPTRNLNGAYLTEGSNGEVDISNGFKNLNLNAALHPDEINIEILNDSHTPGTKVYEVVNEDPETAFCTLANREVFNTDECSIQHCLYQFTRNEKLRDANKLLCEVCTRRQCNGPKANIKGERKHVYTNAKKQMLISLAPPVLTLHLKRFQQAGFNLRKVNKHIKFPEILDLAPFCTLKCKNVAEENTRVLYSLYGVVEHSGTMRSGHYTAYAKARTANSHLSNLVLHGDIPQDFEMESKGQWFHISDTHVQAVPTTKVLNSQAYLLFYERIL

SEQ ID NO: 352 - DNA, 2903 bp, Homo sapiens
ctcaattcgtcaccaggaggaagacggagctggctgcccagcccaaaggcccatgaggggatgcagttatgggctctgtcgccgtggattgttattttgtgtcagtaagtaatccataaagtgccaacatgggaaagaaacggacaaagggaaaaactgttccaatcgatgattcctctgaaactttagaacctgtgtgcagacacattagaaaaggattggaacaaggtaatttgaaaaaggctttagtgaatgtggaatggaatatctgccaagactgtaagactgacaataaagtgaaagataaagctgaagaagaaacagaagaaaagccttcagtttggctgtgtcttaaatgtggccatcagggctgtggcagaaattctcaggagcagcatgccttgaagcactatctgacgccaagatctgaacctcactgtctggttcttagtttggacaactggagtgtatggtgttacgtatgtgataatgaggtccagtattgtagttcaaaccagttgggtcaagtggttgattatgtcagaaaacaagccagcattacaactccaaagccagcagagaaagataatggaaatattgaacttgaaaataaaaaattagaaaaagagagtaagaatgaacaagagagagaaaagaaggaaaacatggctaaagagaatcctcccatgaattctccttgccaaataaccgtgaaaggactcagtaatttgggaaacacatgtttcttcaatgcagttatgcagaacttgtcacaaacaccagtgcttagagaactactaaaagaagtgaaaatgtctggaacaattgtaaaaattgaaccacctgatttggcattaacagaaccattagaaataaaccttgagcctccaggccctcttactttagccatgagccagtttcttaatgagatgcaagagaccaaaaagggggttgtgacaccgaaagaactcttttctcaggtctgtaaaaaagcagtgcggtttaaaggctatcagcagcaagacagccaggagctgcttcgctacttattggatgggatgagagcagaagaacaccaaagagtgagtaaaggaatacttaaagcatttggtaattctactgaaaagttggatgaagaactaaaaaataaagttaaagattatgagaagaaaaaatcaatgccaagttttgttgaccgcatctttggtggtgaactaactagtatgatcatgtgtgatcaatgcagaactgtctccttggttcatgaatctttccttgatttgtccctcccagttttagatgatcagagtggtaagaaaagtgtaaatgataaaaatctgaaaaagacagtggaggatgaagatcaagatagtgaggaagaaaaagataacgacagttacataaaagagagaagtgatattccttctggaacaagtaagcacttacagaaaaaagcaaagaaacaagccaaaaagcaagccaagaaccaacgaagacaacaaaaaattcaaggaaaagttcttcatttaaatgatatttgtactattgaccatcctgaagacagtgaatatgaagctgaaatgtcacttcaaggagaagtaaatattaaatccaaccatatttcacaagagggtgttatgcataaagaatattgtgtcaaccagaaagatttgaatggccaagcaaaaatgatcgaaagtgtaactgacaatcaaaaatccacagaggaagtagatatgaaaaatatcaacatggataatgatctggaggttttaacatcttctcccactaggaatttaaatggtgcctacctaacggaagggagcaatggagaagtggacatttccaatggtttcaaaaacctaaatttgaatgctgctcttcatcctgatgaaataaatatagagattctgaatgatagtcatactcctggaacaaaggtgtatgaggttgtaaatgaagatccagaaactgctttctgtactcttgcaaacagggaagttttcaatactgatgagtgttcaatccaacattgtttatatcagttcacccgtaatgagaaacttcgagatgcgaataaactgctttgtgaagtatgcacacggagacagtgtaatggaccaaaggcaaatataaaaggtgaaaggaagcatgtttacaccaatgccaaaaagcagatgctaatttctcttgctcctcctgttcttactcttcatttaaagagatttcagcaggctggttttaacctacgcaaagttaacaaacacataaagtttccggaaatcttagatttggctcctttttgcacccttaaatgtaagaatgttgcagaagaaaatacaagggtactctattccttatatggagttgttgaacacagtggtactatgaggtcggggcattacactgcctatgccaaggcaagaaccgcaaatagtcatctctctaatcttgttcttcacggtgatattccacaagattttgaaatggaatcaaaagggcagtggtttcacatcagcgacacacatgtgcaagctgtgcctacaactaaagtactaaactcacaagcgtacctcctattttatgagagaatactgtaataatatcaaaagcactttttctggaaacacatttatggcttttataatggctgaaataacgataaaaaaagactaattaaaatcatgttcacttaacattaaatacatgccagaagaaatcatgtttatttaaatattgaagggaaaaatacctaaaaatgtacaaaggttttatattgtcatagtggtttttattcctgctttgtttctggaaaggaaatcctgaattacttaagtactttgtgtttaatatatctgggtgatggatcacaacacatcaataaactgacttaccctaaaatc

SEQ ID NO: 353 - protein, 724 aa, Homo sapiens
MSFPKAPLKRFNDPSGCAPSPGAYDVKTLEVLKGPVSFQKSQRFKQQKESKQNLNVDKDTTLPASARKVKSSESKESQKNDKDLKILEKEIRVLLQERGAQDSRIQDLETELEKMEARLNAALREKTSLSANNATLEKQLIELTRTNELLKSKFSENGNQKNLRILSLELMKLRNKRETKMRGMMAKQEGMEMKLQVTQRSLEESQGKIAQLEGKLVSIEKEKIDEKSETEKLLEYIEEISCASDQVEKYKLDIAQLEENLKEKNDEILSLKQSLEENIVILSKQVEDLNVKCQLLEKEKEDHVNRNREHNENLNAEMQNLKQKFILEQQEREKLQQKELQIDSLLQQEKELSSSLHQKLCSFQEEMVKEKNLFEEELKQTLDELDKLQQKEEQAERLVKQLEEEAKSRAEELKLLEEKLKGKEAELEKSSAAHTQATLLLQEKYDSMVQSLEDVTAQFESYKALTASEIEDLKLENSSLQEKAAKAGKNAEDVQHQILATESSNQEYVRMLLDLQTKSALKETEIKEITVSFLQKITDLQNQLKQQEEDFRKQLEDEEGRKAEKENTTAELTEEINKWRLLYEELYNKTKPFQLQLDAFEVEKQALLNEHGAAQEQLNKIRDSYAKLLGHQNLKQKIKHVVKLKDENSQLKSEVSKLRCQLAKKKQSETKLQEELNKVLGIKHFDPSKAFHHESKENFALKTPLKEGNTNCYRAPMECQESWK

SEQ ID NO: 354 - DNA, 3002 bp, Homo sapiens
gccagtcaccttcagtttctggagctggccgtcaacatgtcctttcctaaggcgcccttgaaacgattcaatgacccttctggttgtgcaccatctccaggtgcttatgatgttaaaactttagaagtattgaaaggaccagtatcctttcagaaatcacaaagatttaaacaacaaaaagaatctaaacaaaatcttaatgttgacaaagatactaccttgcctgcttcagctagaaaagttaagtcttcggaatcaaaggaatctcaaaagaatgataaagatttgaagatattagagaaagagattcgtgttcttctacaggaacgtggtgcccaggacagccggatccaggatctggaaactgagttggaaaagatggaagcaaggctaaatgctgcactaagggaaaaaacatctctctctgcaaataatgctacactggaaaaacaacttattgaattgaccaggactaatgaactactaaaatctaagttttctgaaaatggtaaccagaagaatttgagaattctaagcttggagttgatgaaacttagaaacaaaagagaaacaaagatgaggggtatgatggctaagcaagaaggcatggagatgaagctgcaggtcacccaaaggagtctcgaagagtctcaagggaaaatagcccaactggagggaaaacttgtttcaatagagaaagaaaagattgatgaaaaatctgaaacagaaaaactcttggaatacatcgaagaaattagttgtgcttcagatcaagtggaaaaatacaagctagatattgcccagttagaagaaaatttgaaagagaagaatgatgaaattttaagccttaagcagtctcttgaggagaatattgttatattatctaaacaagtagaagatctaaatgtgaaatgtcagctgcttgaaaaagaaaaagaagaccatgtcaacaggaatagagaacacaacgaaaatctaaatgcagagatgcaaaacttaaaacagaagtttattcttgaacaacaggaacgtgaaaagcttcaacaaaaagaattacaaattgattcacttctgcaacaagagaaagaattatcttcgagtcttcatcagaagctctgttcttttcaagaggaaatggttaaagagaagaatctgtttgaggaagaattaaagcaaacactggatgagcttgataaattacagcaaaaggaggaacaagctgaaaggctggtcaagcaattggaagaggaagcaaaatctagagctgaagaattaaaactcctagaagaaaagctgaaagggaaggaggctgaactggagaaaagtagtgctgctcatacccaggccaccctgcttttgcaggaaaagtatgacagtatggtgcaaagccttgaagatgttactgctcaatttgaaagctataaagcgttaacagccagtgagatagaagatcttaagctggagaactcatcattacaggaaaaagcggccaaggctgggaaaaatgcagaggatgttcagcatcagattttggcaactgagagctcaaatcaagaatatgtaaggatgcttctagatctgcagaccaagtcagcactaaaggaaacagaaattaaagaaatcacagtttcttttcttcaaaaaataactgatttgcagaaccaactcaagcaacaggaggaagactttagaaaacagctggaagatgaagaaggaagaaaagctgaaaaagaaaatacaacagcagaattaactgaagaaattaacaagtggcgtctcctctatgaagaactatataataaaacaaaaccttttcagctacaactagatgcttttgaagtagaaaaacaggcattgttgaatgaacatggtgcagctcaggaacagctaaataaaataagagattcatatgctaaattattgggtcatcagaatttgaaacaaaaaatcaagcatgttgtgaagttgaaagatgaaaatagccaactcaaatcggaagtatcaaaactccgctgtcagcttgctaaaaaaaaacaaagtgagacaaaacttcaagaggaattgaataaagttctaggtatcaaacactttgatccttcaaaggcttttcatcatgaaagtaaagaaaattttgccctgaagaccccattaaaagaaggcaatacaaactgttaccgagctcctatggagtgtcaagaatcatggaagtaaacatctgagaaacctgttgaagattatttcattcgtcttgttgttattgatgttgctgttattatatttgacatgggtattttataatgttgtatttaattttaactgccaatccttaaatatgtgaaaggaacattttttaccaaagtgtcttttgacattttattttttcttgcaaatacctcctccctaatgctcacctttatcacctcattctgaaccctttcgctggctttccagcttagaatgcatctcatcaacttaaaagtcagtatcatattattatcctcctgttctgaaaccttagtttcaagagtctaaaccccagattcttcagcttgatcctggaggtcttttctagtctgagcttctttagctaggctaaaacaccttggcttgttattgcctctactttgattctgataatgctcacttggtcctacctattatccttctacttgtccagttcaaataagaaataaggacaagcctaacttcatagaaacctctctatttttaatcagttgtttaataatttacaggttcttaggctccatcctgtttgtatgaaattataatctgtggattggcctttaagcctgcattcttaacaaactcttcagttaattcttagatacactaaaaatctgagaaactctacatgtaactatttcttcagagtttgtcatatactgcttgtcatctgcatgtctactcagcatttgattaacatttgtgtaatatgaaataaaattacacagtaagtcatttaaccaaaaaaaaaaaaaaaa

SEQ ID NO: 355 - protein, 846 aa, Homo sapiens
MSSSHFASRHRKDISTEMIRTKIAHRKSLSQKENRHKEYERNRHFGLKDVNIPTLEGRILVELDETSQELVPEKTNVKPRAMKTILGDQRKQMLQKYKEEKQLQKLKEQREKAKRGIFKVGRYRPDMPCFLLSNQNAVKAEPKKAIPSSVRITRSKAKDQMEQTKIDNESDVRAIRPGPRQTSEKKVSDKEKKVVQPVMPTSLRMTRSATQAAKQVPRTVSSTTARKPVTRAANENEPEGKVPSKGRPAKNVETKPDKGISCKVDSEENTLNSQTNATSGMNPDGVLSKMENLPEINTAKIKGKNSFAPKDFMFQPLDGLKTYQVTPMTPRSANAFLTPSYTWTPLKTEVDESQATKEILAQKCKTYSTKTIQQDSNKLPCPLGPLTVWHEEHVLNKNEATTKNLNGLPIKEVPSLERNEGRIAQPHHGVPYFRNILQSETEKLTSHCFEWDRKLELDIPDDAKDLIRTAVGQTRLLMKERFKQFEGLVDDCEYKRGIKETTCTDLDGFWDMVSFQIEDVIHKFNNLIKLEESGWQVNNNMNHNMNKNVFRKKVVSGIASKPKQDDAGRIAARNRLAAIKNAMRERIRQEECAETAVSVIPKEVDKIVFDAGFFRVESPVKLFSGLSVSSEGPSQRLGTPKSVNKAVSQSRNEMGIPQQTTSPENAGPQNTKSEHVKKTLFLSIPESRSSIEDAQCPGLPDLIEENHVVNKTDLKVDCLSSERMSLPLLAGGVADDINTNKKEGISDVVEGMELNSSITSQDVLMSSPEKNTASQNSILEEGETKISQSELFDNKSLTTECHLLDSPGLNCSNPFTQLERRHQEHARHISFGGNLITFSPLQPGEF

SEQ ID NO: 356 - DNA, 2979 bp, Homo sapiens
agcaaaccaatcgcaagcctcgttgagtggaaggggtgggatcttccccggaagttttggttaaagcccctccaatcagcggctcggtgcggcaagtttgaatttcgtggaggctcgggttgtgagggttcctgcttcggagtcggcggtggtcgtccagaccgagtgttctttactttttgtttggttgaggtttcacgctagaaggtggctcaggatgtcttcatcacattttgccagtcgacacaggaaggatataagtactgaaatgattagaactaaaattgctcataggaaatcactgtctcagaaagaaaatagacataaggaatacgaacgaaatagacactttggtttgaaagatgtaaacattccaaccttggaaggtagaattcttgttgaattagatgagacatctcaagagcttgttccagaaaagaccaatgttaagccaagggcaatgaaaactattctaggtgatcaacgaaaacagatgctccaaaaatacaaagaagaaaagcaacttcaaaaattgaaagagcagagagagaaagctaaacgaggaatatttaaagtgggtcgttatagacctgatatgccttgttttcttttatcaaaccagaatgctgtgaaagctgagccaaaaaaggctattccatcttctgtacggattacaaggtcaaaggccaaagaccaaatggagcagactaagattgataacgagagtgatgttcgagcaatccgacctggtccaagacaaacttctgaaaagaaagtgtcagacaaagagaaaaaagttgtgcagcctgtaatgcccacgtcgttgagaatgactcgatcagctactcaagcagcaaagcaggttcccagaacagtctcatctaccacagcaagaaagccagtcacaagagctgctaatgaaaacgaaccagaaggaaaggtgccaagtaaaggaagacctgccaaaaatgtagaaacaaaacccgacaagggtatttcttgtaaagtcgatagtgaagaaaatactttgaattcacaaactaatgcaacaagtggaatgaatccagatggagtcttatcaaaaatggaaaacttacctgagataaatactgcaaaaataaaagggaagaattccttcgcacctaaggattttatgtttcagccactggatggtctgaagacctatcaagtaacacctatgactcccagaagtgccaatgcttttttgacacccagttacacctggactcctttaaaaacagaagttgatgagtctcaagcaacaaaagaaattttggcacaaaaatgtaaaacttactctaccaagacaatacagcaagattcaaataaattgccatgtcctttgggtcctctaactgtttggcatgaagaacatgttttaaataaaaatgaagctactactaaaaatttaaatggccttccaataaaagaagtcccatcacttgaaagaaatgaaggtcgaattgctcagccccaccatggtgtgccatatttcagaaatatcctccagtcagaaactgagaaattaacttcacattgcttcgagtgggacaggaaacttgaattggacattccagatgatgctaaagatcttattcgcacagcagttggtcaaacaagactccttatgaaggaaaggtttaaacagtttgaaggactggttgatgattgtgaatataaacgaggtataaaggagactacctgtacagatctggatggattttgggatatggttagttttcagatagaagatgtaatccacaaattcaacaatctgatcaaacttgaggaatctgggtggcaagtcaataataatatgaatcataatatgaacaaaaatgtctttaggaaaaaagttgtctcaggtatagcaagtaaaccaaaacaggatgatgctggaagaattgcagcgagaaatcgcctagctgccataaaaaatgcaatgagagagagaattaggcaggaagaatgtgctgaaacagcagtttctgtgataccaaaggaagttgataaaatagtgttcgatgctggatttttcagagttgaaagtcctgttaaattattctcaggactttctgtctcttctgaaggcccttctcaaagacttggaacacctaagtctgtcaacaaagctgtatctcagagtagaaatgagatgggcattccacaacaaactacatcaccagaaaatgccggtcctcagaatacgaaaagtgaacatgtgaagaagactttgtttttgagtattcctgaaagcaggagcagcatagaagatgctcagtgtcctggattaccagatttaattgaagaaaaccatgttgtaaataagacagacttgaaggtggattgtttatccagtgagagaatgagtttgcctcttcttgctggtggagtagcagatgatattaatactaacaaaaaagaaggaatttcagatgttgtggaaggaatggaactgaattcttcaattacatcacaggatgttttgatgagtagccctgaaaaaaatacagcttcacaaaatagcatcttagaagaaggggaaactaaaatttctcagtcagaactatttgataataaaagtctcactactgaatgccaccttcttgattcaccaggtctaaactgcagtaatccatttactcagctggagaggagacatcaagaacatgccagacacatttcttttggtggtaacctgattactttttcacctctacaaccaggagaattttgaatttaaaaataaatccaaacattttccttcatattatcaatgcttatatattccttagactattgaaattttggagaaaatgtatttgtgttcacttctatagcatataatgttttaatattctgtgttcatcaaagtgtattttagatatactctttctcaagggaagtggggatattttgtacattttcaacacagaataaaaaatgtactgtgccttg

SEQ ID NO: 357 - protein, 191 aa, Homo sapiens
MATLIYVDKEIGEPGTRVAAKDVLKLESRPSIKALDGISQVLTPRFGKTYDAPSALPKATRKALGTVNRATEKSVKTNGPRKQKQPSFSAKKMTEKTVKTKSSVPASDDAYPEIEKFFPFNLLDFESFDLPEERQIAHLPLSGVPLMILDEEGELEKLFQLGPPSPVKMPSPPWECNLFAVSFKHSVDPGC

SEQ ID NO: 358 - DNA, 576 bp, Homo sapiens
atggctactctgatctacgttgataaggaaattggagaaccaggcacccgtgtggctgccaaggatgtgctgaagctggagtctagaccttcaatcaaagcattagatgggatatctcaagttttaacaccacgttttggcaaaacatacgatgctccatcagccttacctaaagctaccagaaaggctttgggcactgtcaacagagctacagaaaagtcagtaaagaccaatggacccagaaaacaaaaacagccaagcttttctgccaaaaagatgaccgagaagactgttaaaacaaaaagttctgttcctgcctcagatgacgcctatccagaaatagaaaaattctttcccttcaatcttctagactttgagagttttgacctgcctgaagagcgccagattgcacacctccccttgagtggagtgcctctcatgatccttgatgaggagggagagcttgaaaagctgtttcagctgggccccccttcacctgtgaaaatgccctctccaccatgggaatgcaatctgtttgcagtctccttcaagcattctgtcgaccctggatgttga

SEQ ID NO: 359 - protein, 202 aa, Homo sapiens
MATLIYVDKENEEPGILVATKDGLKLGSGPSIKALDGRSQVSISCFGKTFDAPTSLPKATRKALGTVNRATEKSVKTNGPLKQKQPSFSAKKMTEKTVKAKNSVPASDDGYPEIEKLFPFNPLGFESFDLPEEHQIAHLPLSEVPLMILDEERELEKLFQLGPPSPLKMPSPPWKSNLLQSPLSILLTLDVELPPVCCDIDI

SEQ ID NO: 360 - DNA, 609 bp, Homo sapiens
atggctactctgatctatgttgataaggaaaacgaagaaccaggcatccttgtggctacaaaggatgggctgaagctggggtctggaccttcaatcaaagccttagatgggagatctcaagtttcaatatcatgttttggcaaaacattcgatgctcccacatccttacctaaagctaccagaaaggctttgggaactgtcaacagagctacagaaaagtcagtaaagaccaatggacccctcaaacaaaaacagccaagcttttctgccaaaaagatgactgagaagactgttaaagcaaaaaactctgttcctgcctcagatgatggctatccagaaatagaaaaattatttcccttcaatcctctaggcttcgagagttttgacctgcctgaagagcaccagattgcacatctccccttgagtgaagtgcctctcatgatacttgatgaggagagagagcttgaaaagctgtttcagctgggccccccttcacctttgaagatgccctctccaccatggaaatccaatctgttgcagtctcctttaagcattctgttgaccctggatgttgaattgccacctgtttgctgtgacatagatatttaa

SEQ ID NO: 361 - protein, 450 aa, Homo sapiens
MDARRVPQKDLRVKKNLKKFRYVKLISMETSSSSDDSCDSFASDNFANTKPKFRSDISEELASVFYEDSDNESFCGFSESEVQDVLDHCGFLQKPRPDVTNELAGIFHADSDDESFCGFSESEIQDGMRLQSVREGCRTRSQCRHSGPLRVAMKFPARSTRGATNKKAESRQPSENSVTDSNSDSEDESGMNFLEKRALNIKQNKAMLAKLMSELESFPGSFRGRHPLPGSDSQSRRPRRRTFPGVASRRNPERRARPLTRSRSRILGSLDALPMEEEEEEDKYMLVRKRKTVDGYMNEDDLPRSRRSRSSVTLPHIIRPVEEITEEELENVCSNSREKIYNRSLGSTCHQCRQKTIDTKTNCRNPDCWGVRGQFCGPCLRNRYGEEVRDALLDPNWHCPPCRGICNCSFCRQRDGRCATGVLVYLAKYHGFGNVHAYLKSLKQEFEMQA

SEQ ID NO: 362 - DNA, 2824 bp, Homo sapiens
cccgagccccgcccctccgggcccgggtcggcgcgcccagcctgccagccgcgctgctgctgctcctcctgctgtgggaccgctgaccgcgcggctgctccgctctccccgctccaagcgccgatctgggcacccgccaccagcatggacgctcgccgcgtgccgcagaaagatctcagagtaaagaagaacttaaagaaattcagatatgtgaagttgatttccatggaaacctcgtcatcctctgatgacagttgtgacagctttgcttctgataattttgcaaacacgaaacctaaattcaggtcagatatcagtgaagaactggcaagtgttttttatgaggactctgataatgaatctttctgcggcttttcagaaagtgaggtgcaagatgtattagaccattgtggatttttacagaaaccaaggccagatgtcactaacgaactggccggtatttttcatgccgactctgacgatgaatcattttgcggtttctcagagagtgagatacaagatggaatgaggctgcagtcagttcgggaaggctgtaggacccgcagccagtgcaggcactctggacctctcagggtggcgatgaagtttccagcgcggagtaccaggggagcaaccaacaaaaaagcagagtcccgccagccctcagagaattctgtgactgattccaactccgattcagaagatgaaagtggaatgaattttttggagaaaagggctttaaatataaagcaaaacaaagcaatgcttgcaaaactcatgtctgaattagaaagcttccctggctcgttccgtggaagacatcccctcccaggctccgactcacaatcaaggagaccgcgaaggcgtacattcccgggtgttgcttccaggagaaaccctgaacggagagctcgtcctcttaccaggtcaaggtcccggatcctcgggtcccttgacgctctacccatggaggaggaggaggaagaggataagtacatgttggtgagaaagaggaagaccgtggatggctacatgaatgaagatgacctgcccagaagccgtcgctccagatcatccgtgacccttccgcatataattcgcccagtggaagaaattacagaggaggagttggagaacgtctgcagcaattctcgagagaagatatataaccgttcactgggctctacttgtcatcaatgccgtcagaagactattgataccaaaacaaactgcagaaacccagactgctggggcgttcgaggccagttctgtggcccctgccttcgaaaccgttatggtgaagaggtcagggatgctctgctggatccgaactggcattgcccgccttgtcgaggaatctgcaactgcagtttctgccggcagcgagatggacggtgtgcgactggggtccttgtgtatttagccaaatatcatggctttgggaatgtgcatgcctacttgaaaagcctgaaacaggaatttgaaatgcaagcataatatctggaaaatttgctgcctgccttctacttctcaaatctttcttgtaaaagtttccaattttttcactgaaacctgagttaaaaatcttgatgatcagcctgtttcataagaaactccaatcaagttaatcttagcagacatgtgtttctggagcatcacagaaggtatattgctagttacactttgccctcctgcagtttcttctctgctcccaacccccatctcatagcatccccctctatttccaatgctcctctccaaccgcttagtttctgaatttcttttaaattacagttttatgaaagcatattttatttacttggtgttgaaatagccctcataaaacctaagcacttggaaacacaataatagtattaactaactagatctattgaatttcagagaagagccttctaacttgtttacacaaaaacgagtatgatttagcattcatactagttgaaatttttaatagaatcaaggcacaaaagtcttaaaaccatgtggaaaaattaggtaattattgcagattgatgtctctcaatcccatgtattgcgcttatgttacaagttgttgtcacagttgagacttaatttctcctaatttcttctgcccgaagggtaagtggtgcgtccagcttacacaatcataattcaaaggttggtgggcaatgtaatacttaattaaaataatgatggaagagctatctggagattatgagtaagctgatttgaattttcagtataaaactttagtataattgtagtttgcaaagtttatttcagttcacatgtaaggtattgcaaataaattcttggacaattttgtatggaaacttgatattaaaaactagtctgtggttctttgcagtttcttgtaaatttataaaccaggcacaaggttcaagtttagattttaagcacttttataacaatgataagtgcctttttggagatgtaacttttagcagtttgttaacctgacatctctgccagtctagtttctgggcaggtttcctgtgtcagtattccccctcctctttgcattaatcaaggtatttggtagaggtggaatctaagtgtttgtatgtccaatttacttgcatatgtaaaccattgctgtgccattcaatgtttgatgcataattggaccttgaatcgataagtgtaaatacagcttttgatctgtaatgcttttatacaaaagtttattttaataataaaatgtttgttctaacttgtctgcttttttaaaaataatcttactgtacttaattctaattttttcctcatatttaaataaaaggccatttccaccttttct

SEQ ID NO: 363 - protein, 371 aa, Homo sapiens
MDARRVPQKDLRVKKNLKKFRYVKLISMETSSSSDDSCDSFASDNFANTRLQSVREGCRTRSQCRHSGPLRVAMKFPARSTRGATNKKAESRQPSENSVTDSNSDSEDESGMNFLEKRALNIKQNKAMLAKLMSELESFPGSFRGRHPLPGSDSQSRRPRRRTFPGVASRRNPERRARPLTRSRSRILGSLDALPMEEEEEEDKYMLVRKRKTVDGYMNEDDLPRSRRSRSSVTLPHIIRPVEEITEEELENVCSNSREKIYNRSLGSTCHQCRQKTIDTKTNCRNPDCWGVRGQFCGPCLRNRYGEEVRDALLDPNWHCPPCRGICNCSFCRQRDGRCATGVLVYLAKYHGFGNVHAYLKSLKQEFEMQA

SEQ ID NO: 364 - DNA, 2587 bp, Homo sapiens
cccgagccccgcccctccgggcccgggtcggcgcgcccagcctgccagccgcgctgctgctgctcctcctgctgtgggaccgctgaccgcgcggctgctccgctctccccgctccaagcgccgatctgggcacccgccaccagcatggacgctcgccgcgtgccgcagaaagatctcagagtaaagaagaacttaaagaaattcagatatgtgaagttgatttccatggaaacctcgtcatcctctgatgacagttgtgacagctttgcttctgataattttgcaaacacgaggctgcagtcagttcgggaaggctgtaggacccgcagccagtgcaggcactctggacctctcagggtggcgatgaagtttccagcgcggagtaccaggggagcaaccaacaaaaaagcagagtcccgccagccctcagagaattctgtgactgattccaactccgattcagaagatgaaagtggaatgaattttttggagaaaagggctttaaatataaagcaaaacaaagcaatgcttgcaaaactcatgtctgaattagaaagcttccctggctcgttccgtggaagacatcccctcccaggctccgactcacaatcaaggagaccgcgaaggcgtacattcccgggtgttgcttccaggagaaaccctgaacggagagctcgtcctcttaccaggtcaaggtcccggatcctcgggtcccttgacgctctacccatggaggaggaggaggaagaggataagtacatgttggtgagaaagaggaagaccgtggatggctacatgaatgaagatgacctgcccagaagccgtcgctccagatcatccgtgacccttccgcatataattcgcccagtggaagaaattacagaggaggagttggagaacgtctgcagcaattctcgagagaagatatataaccgttcactgggctctacttgtcatcaatgccgtcagaagactattgataccaaaacaaactgcagaaacccagactgctggggcgttcgaggccagttctgtggcccctgccttcgaaaccgttatggtgaagaggtcagggatgctctgctggatccgaactggcattgcccgccttgtcgaggaatctgcaactgcagtttctgccggcagcgagatggacggtgtgcgactggggtccttgtgtatttagccaaatatcatggctttgggaatgtgcatgcctacttgaaaagcctgaaacaggaatttgaaatgcaagcataatatctggaaaatttgctgcctgccttctacttctcaaatctttcttgtaaaagtttccaattttttcactgaaacctgagttaaaaatcttgatgatcagcctgtttcataagaaactccaatcaagttaatcttagcagacatgtgtttctggagcatcacagaaggtatattgctagttacactttgccctcctgcagtttcttctctgctcccaacccccatctcatagcatccccctctatttccaatgctcctctccaaccgcttagtttctgaatttcttttaaattacagttttatgaaagcatattttatttacttggtgttgaaatagccctcataaaacctaagcacttggaaacacaataatagtattaactaactagatctattgaatttcagagaagagccttctaacttgtttacacaaaaacgagtatgatttagcattcatactagttgaaatttttaatagaatcaaggcacaaaagtcttaaaaccatgtggaaaaattaggtaattattgcagattgatgtctctcaatcccatgtattgcgcttatgttacaagttgttgtcacagttgagacttaatttctcctaatttcttctgcccgaagggtaagtggtgcgtccagcttacacaatcataattcaaaggttggtgggcaatgtaatacttaattaaaataatgatggaagagctatctggagattatgagtaagctgatttgaattttcagtataaaactttagtataattgtagtttgcaaagtttatttcagttcacatgtaaggtattgcaaataaattcttggacaattttgtatggaaacttgatattaaaaactagtctgtggttctttgcagtttcttgtaaatttataaaccaggcacaaggttcaagtttagattttaagcacttttataacaatgataagtgcctttttggagatgtaacttttagcagtttgttaacctgacatctctgccagtctagtttctgggcaggtttcctgtgtcagtattccccctcctctttgcattaatcaaggtatttggtagaggtggaatctaagtgtttgtatgtccaatttacttgcatatgtaaaccattgctgtgccattcaatgtttgatgcataattggaccttgaatcgataagtgtaaatacagcttttgatctgtaatgcttttatacaaaagtttattttaataataaaatgtttgttctaacttgtctgcttttttaaaaataatcttactgtacttaattctaattttttcctcatatttaaataaaaggccatttccaccttttct

SEQ ID NO: 365 - protein, 709 aa, Homo sapiens
MSFPKAPLKRFNDPSGCAPSPGAYDVKTLEVLKGPVSFQKSQRFKQQKESKQNLNVDKDTTLPASARKVKSSESKIRVLLQERGAQDSRIQDLETELEKMEARLNAALREKTSLSANNATLEKQLIELTRTNELLKSKFSENGNQKNLRILSLELMKLRNKRETKMRGMMAKQEGMEMKLQVTQRSLEESQGKIAQLEGKLVSIEKEKIDEKSETEKLLEYIEEISCASDQVEKYKLDIAQLEENLKEKNDEILSLKQSLEENIVILSKQVEDLNVKCQLLEKEKEDHVNRNREHNENLNAEMQNLKQKFILEQQEREKLQQKELQIDSLLQQEKELSSSLHQKLCSFQEEMVKEKNLFEEELKQTLDELDKLQQKEEQAERLVKQLEEEAKSRAEELKLLEEKLKGKEAELEKSSAAHTQATLLLQEKYDSMVQSLEDVTAQFESYKALTASEIEDLKLENSSLQEKAAKAGKNAEDVQHQILATESSNQEYVRMLLDLQTKSALKETEIKEITVSFLQKITDLQNQLKQQEEDFRKQLEDEEGRKAEKENTTAELTEEINKWRLLYEELYNKTKPFQLQLDAFEVEKQALLNEHGAAQEQLNKIRDSYAKLLGHQNLKQKIKHVVKLKDENSQLKSEVSKLRCQLAKKKQSETKLQEELNKVLGIKHFDPSKAFHHESKENFALKTPLKEGNTNCYRAPMECQESWK

SEQ ID NO: 366 - DNA, 2957 bp, Homo sapiens
gccagtcaccttcagtttctggagctggccgtcaacatgtcctttcctaaggcgcccttgaaacgattcaatgacccttctggttgtgcaccatctccaggtgcttatgatgttaaaactttagaagtattgaaaggaccagtatcctttcagaaatcacaaagatttaaacaacaaaaagaatctaaacaaaatcttaatgttgacaaagatactaccttgcctgcttcagctagaaaagttaagtcttcggaatcaaagattcgtgttcttctacaggaacgtggtgcccaggacagccggatccaggatctggaaactgagttggaaaagatggaagcaaggctaaatgctgcactaagggaaaaaacatctctctctgcaaataatgctacactggaaaaacaacttattgaattgaccaggactaatgaactactaaaatctaagttttctgaaaatggtaaccagaagaatttgagaattctaagcttggagttgatgaaacttagaaacaaaagagaaacaaagatgaggggtatgatggctaagcaagaaggcatggagatgaagctgcaggtcacccaaaggagtctcgaagagtctcaagggaaaatagcccaactggagggaaaacttgtttcaatagagaaagaaaagattgatgaaaaatctgaaacagaaaaactcttggaatacatcgaagaaattagttgtgcttcagatcaagtggaaaaatacaagctagatattgcccagttagaagaaaatttgaaagagaagaatgatgaaattttaagccttaagcagtctcttgaggagaatattgttatattatctaaacaagtagaagatctaaatgtgaaatgtcagctgcttgaaaaagaaaaagaagaccatgtcaacaggaatagagaacacaacgaaaatctaaatgcagagatgcaaaacttaaaacagaagtttattcttgaacaacaggaacgtgaaaagcttcaacaaaaagaattacaaattgattcacttctgcaacaagagaaagaattatcttcgagtcttcatcagaagctctgttcttttcaagaggaaatggttaaagagaagaatctgtttgaggaagaattaaagcaaacactggatgagcttgataaattacagcaaaaggaggaacaagctgaaaggctggtcaagcaattggaagaggaagcaaaatctagagctgaagaattaaaactcctagaagaaaagctgaaagggaaggaggctgaactggagaaaagtagtgctgctcatacccaggccaccctgcttttgcaggaaaagtatgacagtatggtgcaaagccttgaagatgttactgctcaatttgaaagctataaagcgttaacagccagtgagatagaagatcttaagctggagaactcatcattacaggaaaaagcggccaaggctgggaaaaatgcagaggatgttcagcatcagattttggcaactgagagctcaaatcaagaatatgtaaggatgcttctagatctgcagaccaagtcagcactaaaggaaacagaaattaaagaaatcacagtttcttttcttcaaaaaataactgatttgcagaaccaactcaagcaacaggaggaagactttagaaaacagctggaagatgaagaaggaagaaaagctgaaaaagaaaatacaacagcagaattaactgaagaaattaacaagtggcgtctcctctatgaagaactatataataaaacaaaaccttttcagctacaactagatgcttttgaagtagaaaaacaggcattgttgaatgaacatggtgcagctcaggaacagctaaataaaataagagattcatatgctaaattattgggtcatcagaatttgaaacaaaaaatcaagcatgttgtgaagttgaaagatgaaaatagccaactcaaatcggaagtatcaaaactccgctgtcagcttgctaaaaaaaaacaaagtgagacaaaacttcaagaggaattgaataaagttctaggtatcaaacactttgatccttcaaaggcttttcatcatgaaagtaaagaaaattttgccctgaagaccccattaaaagaaggcaatacaaactgttaccgagctcctatggagtgtcaagaatcatggaagtaaacatctgagaaacctgttgaagattatttcattcgtcttgttgttattgatgttgctgttattatatttgacatgggtattttataatgttgtatttaattttaactgccaatccttaaatatgtgaaaggaacattttttaccaaagtgtcttttgacattttattttttcttgcaaatacctcctccctaatgctcacctttatcacctcattctgaaccctttcgctggctttccagcttagaatgcatctcatcaacttaaaagtcagtatcatattattatcctcctgttctgaaaccttagtttcaagagtctaaaccccagattcttcagcttgatcctggaggtcttttctagtctgagcttctttagctaggctaaaacaccttggcttgttattgcctctactttgattctgataatgctcacttggtcctacctattatccttctacttgtccagttcaaataagaaataaggacaagcctaacttcatagaaacctctctatttttaatcagttgtttaataatttacaggttcttaggctccatcctgtttgtatgaaattataatctgtggattggcctttaagcctgcattcttaacaaactcttcagttaattcttagatacactaaaaatctgagaaactctacatgtaactatttcttcagagtttgtcatatactgcttgtcatctgcatgtctactcagcatttgattaacatttgtgtaatatgaaataaaattacacagtaagtcatttaaccaaaaaaaaaaaaaaaa

SEQ ID NO: 367 - protein, 79 aa, Homo sapiens [sequence omitted]

SEQ ID NO: 368 - DNA, 717 bp, Homo sapiens; identical to SEQ ID NO: 348

SEQ ID NO: 369 - protein, 191 aa, Homo sapiens; identical to SEQ ID NO: 357

SEQ ID NO: 370 - DNA, 576 bp, Homo sapiens; identical to SEQ ID NO: 358

SEQ ID NO: 371 - protein, 212 aa, Homo sapiens
MKPPSSIQTSEFDSSDEEPIEDEQTPIHISWLSLSRVNCSQFLGLCALPGCKFKDVRRNVQKDTEELKSCGIQDIFVFCTRGELSKYRVPNLLDLYQQCGIITHHHPIADGGTPDIASCCEIMEELTTCLKNYRKTLIHCYGGLGRSCLVAACLLLYLSDTISPEQAIDSLRDLRGSGAIQTIKQYNYLHEFRDKLAAHLSSRDSQSRSVSR

SEQ ID NO: 372 - DNA, 836 bp, Homo sapiens
ccggtgagtcgccggcgctgcagagggaggcggcactggtctcgacgtggggcggccagcgatgaagccgcccagttcaatacaaacaagtgagtttgactcatcagatgaagagcctattgaagatgaacagactccaattcatatatcatggctatctttgtcacgagtgaattgttctcagtttctcggtttatgtgctcttccaggttgtaaatttaaagatgttagaagaaatgtccaaaaagatacagaagaactaaagagctgtggtatacaagacatatttgttttctgcaccagaggggaactgtcaaaatatagagtcccaaaccttctggatctctaccagcaatgtggaattatcacccatcatcatccaatcgcagatggagggactcctgacatagccagctgctgtgaaataatggaagagcttacaacctgccttaaaaattaccgaaaaaccttaatacactgctatggaggacttgggagatcttgtcttgtagctgcttgtctcctactatacctgtctgacacaatatcaccagagcaagccatagacagcctgcgagacctaagaggatccggggcaatacagaccatcaagcaatacaattatcttcatgagtttcgggacaaattagctgcacatctatcatcaagagattcacaatcaagatctgtatcaagataaaggaattcaaatagcatatatatgaccatgtctgaaatgtcagttctctagcataatttgtattgaaatgaaaccaccagtgttatcaacttgaatgtaaatgtacatgtgcagatattcctaaagttttattgac

SEQ ID NO: 373 - protein, 1085 aa, Homo sapiens
MDTPENVLQMLEAHMQSYKGNDPLGEWERYIQWVEENFPENKEYLITLLEHLMKEFLDKKKYHNDPRFISYCLKFAEYNSDLHQFFEFLYNHGIGTLSSPLYIAWAGHLEAQGELQHASAVLQRGIQNQAEPREFLQQQYRLFQTRLTETHLPAQARTSEPLHNVQVLNQMITSKSNPGNNMACISKNQGSELSGVISSACDKESNMERRVITISKSEYSVHSSLASKVDVEQVVMYCKEKLIRGESEFSFEELRAQKYNQRRKHEQWVNEDRHYMKRKEANAFEEQLLKQKMDELHKKLHQVVETSHEDLPASQERSEVNPARMGPSVGSQQELRAPCLPVTYQQTPVNMEKNPREAPPVVPPLANAISAALVSPATSQSIAPPVPLKAQTVTDSMFAVASKDAGCVNKSTHEFKPQSGAEIKEGCETHKVANTSSFHTTPNTSLGMVQATPSKVQPSPTVHTKEALGFIMNMFQAPTLPDISDDKDEWQSLDQNEDAFEAQFQKNVRSSGAWGVNKIISSLSSAFHVFEDGNKENYGLPQPKNKPTGARTFGERSVSRLPSKPKEEVPHAEEFLDDSTVWGIRCNKTLAPSPKSPGDFTSAAQLASTPFHKLPVESVHILEDKENVVAKQCTQATLDSCEENMVVPSRDGKFSPIQEKSPKQALSSHMYSASLLRLSQPAAGGVLTCEAELGVEACRLTDTDAAIAEDPPDAIAGLQAEWMQMSSLGTVDAPNFIVGNPWDDKLIFKLLSGLSKPVSSYPNTFEWQCKLPAIKPKTEFQLGSKLVYVHHLLGEGAFAQVYEATQGDLNDAKNKQKFVLKVQKPANPWEFYIGTQLMERLKPSMQHMFMKFYSAHLFQNGSVLVGELYSYGTLLNAINLYKNTPEKVMPQGLVISFAMRMLYMIEQVHDCEIIHGDIKPDNFILGNGFLEQDDEDDLSAGLALIDLGQSIDMKLFPKGTIFTAKCETSGFQCVEMLSNKPWNYQIDYFGVAATVYCMLFGTYMKVKNEGGECKPEGLFRRLPHLDMWNEFFHVMLNIPDCHHLPSLDLLRQKLKKVFQQHYTNKIRALRNRLIVLLLECKRSRK

SEQ ID NO: 374 - DNA, 3446 bp, Homo sapiens
ttctagtttgcggttcaggtttgccgctgccggccagcgtcctctggccatggacaccccggaaaatgtccttcagatgcttgaagcccacatgcagagctacaagggcaatgaccctcttggtgaatgggaaagatacatacagtgggtagaagagaattttcctgagaataaagaatacttgataactttactagaacatttaatgaaggaatttttagataagaagaaataccacaatgacccaagattcatcagttattgtttaaaatttgctgagtacaacagtgacctccatcaattttttgagtttctgtacaaccatgggattggaaccctgtcatcccctctgtacattgcctgggcggggcatctggaagcccaaggagagctgcagcatgccagtgctgtccttcagagaggaattcaaaaccaggctgaacccagagagttcctgcaacaacaatacaggttatttcagacacgcctcactgaaacccatttgccagctcaagctagaacctcagaacctctgcataatgttcaggttttaaatcaaatgataacatcaaaatcaaatccaggaaataacatggcctgcatttctaagaatcagggttcagagctttctggagtgatatcttcagcttgtgataaagagtcaaatatggaacgaagagtgatcacgatttctaaatcagaatattctgtgcactcatctttggcatccaaagttgatgttgagcaggttgttatgtattgcaaggagaagcttattcgtggggaatcagaattttcctttgaagaattgagagcccagaaatacaatcaacggagaaagcatgagcaatgggtaaatgaagacagacattatatgaaaaggaaagaagcaaatgcttttgaagaacagctattaaaacagaaaatggatgaacttcataagaagttgcatcaggtggtggagacatcccatgaggatctgcccgcttcccaggaaaggtccgaggttaatccagcacgtatggggccaagtgtaggctcccagcaggaactgagagcgccatgtcttccagtaacctatcagcagacaccagtgaacatggaaaagaacccaagagaggcacctcctgttgttcctcctttggcaaatgctatttctgcagctttggtgtccccagccaccagccagagcattgctcctcctgttcctttgaaagcccagacagtaacagactccatgtttgcagtggccagcaaagatgctggatgtgtgaataagagtactcatgaattcaagccacagagtggagcagagatcaaagaagggtgtgaaacacataaggttgccaacacaagttcttttcacacaactccaaacacatcactgggaatggttcaggcaacgccatccaaagtgcagccatcacccaccgtgcacacaaaagaagcattaggtttcatcatgaatatgtttcaggctcctacacttcctgatatttctgatgacaaagatgaatggcaatctctagatcaaaatgaagatgcatttgaagcccagtttcaaaaaaatgtaaggtcatctggggcttggggagtcaataagatcatctcttctttgtcatctgcttttcatgtgtttgaagatggaaacaaagaaaattatggattaccacagcctaaaaataaacccacaggagccaggacctttggagaacgctctgtcagcagacttccttcaaaaccaaaggaggaagtgcctcatgctgaagagtttttggatgactcaactgtatggggtattcgctgcaacaaaaccctggcacccagtcctaagagcccaggagacttcacatctgctgcacaacttgcgtctacaccattccacaagcttccagtggagtcagtgcacattttagaagataaagaaaatgtggtagcaaaacagtgtacccaggcgactttggattcttgtgaggaaaacatggtggtgccttcaagggatggaaaattcagtccaattcaagagaaaagcccaaaacaggccttgtcgtctcacatgtattcagcatccttacttcgtctgagccagcctgctgcaggtggggtacttacctgtgaggcagagttgggcgttgaggcttgcagactcacagacactgacgctgccattgcagaagatccaccagatgctattgctgggctccaagcagaatggatgcagatgagttcacttgggactgttgatgctccaaacttcattgttgggaacccatgggatgataagctgattttcaaacttttatctgggctttctaaaccagtgagttcctatccaaatacttttgaatggcaatgtaaacttccagccatcaagcccaagactgaatttcaattgggttctaagctggtctatgtccatcaccttcttggagaaggagcctttgcccaggtgtacgaagctacccagggagatctgaatgatgctaaaaataaacagaaatttgttttaaaggtccaaaagcctgccaacccctgggaattctacattgggacccagttgatggaaagactaaagccatctatgcagcacatgtttatgaagttctattctgcccacttattccagaatggcagtgtattagtaggagagctctacagctatggaacattattaaatgccattaacctctataaaaatacccctgaaaaagtgatgcctcaaggtcttgtcatctcttttgctatgagaatgctttacatgattgagcaagtgcatgactgtgaaatcattcatggagacattaaaccagacaatttcatacttggaaacggatttttggaacaggatgatgaagatgatttatctgctggcttggcactgattgacctgggtcagagtatagatatgaaactttttccaaaaggaactatattcacagcaaagtgtgaaacatctggttttcagtgtgttgagatgctcagcaacaaaccatggaactaccagatcgattactttggggttgctgcaacagtatattgcatgctctttggcacttacatgaaagtgaaaaatgaaggaggagagtgtaagcctgaaggtctttttagaaggcttcctcatttggatatgtggaatgaattttttcatgttatgttgaatattccagattgtcatcatcttccatctttggatttgttaaggcaaaagctgaagaaagtatttcaacaacactatactaacaagattagggccctacgtaataggctaattgtactgctcttagaatgtaagcgttcacgaaaataaaatttggatatagacagtccttaaaaatcacactgtaaatatgaatctgctcactttaaacctgtttttttttcatttattgtttatgtaaatgtttgttaaaaataaatcccatggaatatttccatgtaaaaaaaaa

SEQ ID NO: 375 - protein, 724 aa, Homo sapiens; identical to SEQ ID NO: 353

SEQ ID NO: 376 - DNA, 3002 bp, Homo sapiens; identical to SEQ ID NO: 354

SEQ ID NO: 377 - protein, 246 aa, Homo sapiens
MNDWMPIAKEYDPLKAGSIDGTDEDPHDRAVWRAMLARYVPNKGVIGDPLLTLFVARLNLQTKEDKLKEVFSRYGDIRRLRLVRDLVTGFSKGYAFIEYKEERAVIKAYRDADGLVIDQHEIFVDYELERTLKGWIPRRLGGGLGGKKESGQLRFGGRDRPFRKPINLPVVKNDLYREGKRERRERSRSRERHWDSRTRDRDHDRGREKRWQEREPTRVWPDNDWERERDFRDDRIKGREKKERGK

SEQ ID NO: 378 - DNA, 1509 bp, Homo sapiens
ggcgaatctgctgctaccaatgtaaaggtcaggccgaggccggcgcggagaatctgctgtcgcctgcagctgctcgcctgtctccgtcggaagggagcccaagctttgcagagagacagggagtcgcccaggctggagagcggtggcgcgatctcggctcactgcagcgtcgacatttcgggtcaagcgatcctccagcctcggcctctcaaagtgctggtattacaggcgtgagccagcgcgtgcctggccaaaaattttctaaatttgtataataatttataattgtaatgcatttttatagacaccatatgatctaatcttcacaaaaacctagtgaagtgacatttagctacatttcacaataagaatcctgaagctcaaaatttactgacctcaaataatcccagcactttgggaggctgaggcaggcgggtcatctgacatcaggagtttgagaccagcttggccaacatggtgaaatcctgtctgtactaaaaatgcaaaaattagctgggcgtggtggtgtgtgtctgtaatcccagctactcggcctcccaaagtgctgggattacaggcgtgagccaccgcgtctggcctcagccaaggtttttaagtaacatatttcagcattggctctacagcgttgcagaacatgaacgattggatgcccatcgccaaggagtatgatccactcaaagcgggcagcattgatggcaccgatgaagacccacacgaccgcgcggtctggagggcaatgctggcacgatatgtccccaacaaaggtgtcataggagatcccctcctcaccctgtttgtggccagactaaacttgcagaccaaggaggacaaattaaaggaagtcttttcccgctatggtgacatccggcggcttcggctggtcagggacttggtcacaggtttttcaaagggctacgccttcatcgaatacaaggaggagcgtgccgtgatcaaagcttaccgagatgctgatggcctggttattgaccagcatgagatatttgtggactacgagctggaaaggactctcaaagggtggatccctcggcgacttggaggcggtcttgggggaaaaaaggagtctgggcaactgagatttgggggacgggaccggccttttcgaaaacctattaacttgccagttgttaaaaacgacctctatagagagggaaaacgggaaaggcgggagcgatctcgatcccgagaaagacactgggactcgaggacaagggatcgagaccatgacaggggccgggagaagagatggcaagaaagagagccgaccagggtgtggcccgacaatgactgggagagagagagggacttcagagatgacaggatcaaggggagggagaagaaggaaagaggcaagtagaggcccaacagcagaaccccaaagtgaagttacagtggaaatgagtggagggggattgtctttcaacgcagcgtgagtctaatggttgaataaaacttactgatgatcaaaaa

SEQ ID NO: 379 - protein, 246 aa, Homo sapiens; identical to SEQ ID NO: 377

SEQ ID NO: 380 - DNA, 967 bp, Homo sapiens
ggcgaatctgctgctaccaatgtaaaggtcaggccgaggccggcgcggagaatctgctgtcgcctgcagctgctcgcctgtctccgtcggaagggagcccaagctttgcagagaacatgaacgattggatgcccatcgccaaggagtatgatccactcaaagcgggcagcattgatggcaccgatgaagacccacacgaccgcgcggtctggagggcaatgctggcacgatatgtccccaacaaaggtgtcataggagatcccctcctcaccctgtttgtggccagactaaacttgcagaccaaggaggacaaattaaaggaagtcttttcccgctatggtgacatccggcggcttcggctggtcagggacttggtcacaggtttttcaaagggctacgccttcatcgaatacaaggaggagcgtgccgtgatcaaagcttaccgagatgctgatggcctggttattgaccagcatgagatatttgtggactacgagctggaaaggactctcaaagggtggatccctcggcgacttggaggcggtcttgggggaaaaaaggagtctgggcaactgagatttgggggacgggaccggccttttcgaaaacctattaacttgccagttgttaaaaacgacctctatagagagggaaaacgggaaaggcgggagcgatctcgatcccgagaaagacactgggactcgaggacaagggatcgagaccatgacaggggccgggagaagagatggcaagaaagagagccgaccagggtgtggcccgacaatgactgggagagagagagggacttcagagatgacaggatcaaggggagggagaagaaggaaagaggcaagtagaggcccaacagcagaaccccaaagtgaagttacagtggaaatgagtggagggggattgtctttcaacgcagcgtgagtctaatggttgaataaaacttactgatgatcaa

SEQ ID NO: 381 - protein, 226 aa, Homo sapiens
MSETAPAETATPAPVEKSPAKKKATKKAAGAGAAKRKATGPPVSELITKAVAASKERNGLSLAALKKALAAGGYDVEKNNSRIKLGLKSLVSKGTLVQTKGTGASGSFKLNKKAASGEAKPKAKKAGAAKAKKPAGATPKKAKKAAGAKKAVKKTPKKAKKPAAAGVKKVAKSPKKAKAAAKPKKATKSPAKPKAVKPKAAKPKAAKPKAAKPKAAKAKKAAAKKK

SEQ ID NO: 382 - DNA, 790 bp, Homo sapiens
aacctgctctttagatttcgagcttattctcttctagcagtttcttgccaccatgtcggaaaccgctcctgccgagacagccaccccagcgccggtggagaaatccccggctaagaagaaggcaactaagaaggctgccggcgccggcgctgctaagcgcaaagcgacggggcccccagtctcagagctgatcaccaaggctgtggctgcttctaaggagcgcaatggcctttctttggcagcccttaagaaggccttagcggccggtggctacgacgtggagaagaataacagccgcattaagctgggcctcaagagcttggtgagcaagggcaccctggtgcagaccaagggcactggtgcttctggctcctttaaactcaacaagaaggcggcctccggggaagccaagcccaaagccaagaaggcaggcgccgctaaagctaagaagcccgcgggggccacgcctaagaaggccaagaaggctgcaggggcgaaaaaggcagtgaagaagactccgaagaaggcgaagaagcccgcggcggctggcgtcaaaaaggtggcgaagagccctaagaaggccaaggccgctgccaaaccgaaaaaggcaaccaagagtcctgccaagcccaaggcagttaagccgaaggcggcaaagcccaaagccgctaagcccaaagcagcaaaacctaaagctgcaaaggccaagaaggcggctgccaaaaagaagtaggaagctggcgtgtgaaaaccgcaacaaagccccaaaggctcttttcagagccaccca

SEQ ID NO: 383 - protein, 202 aa, Homo sapiens; identical to SEQ ID NO: 359

SEQ ID NO: 384 - DNA, 609 bp, Homo sapiens; identical to SEQ ID NO: 360

SEQ ID NO: 385 - protein, 322 aa, Homo sapiens
MEGISNFKTPSKLSEKKKSVLCSTPTINIPASPFMQKLGFGTGVNVYLMKRSPRGLSHSPWAVKKINPICNDHYRSVYQKRLMDEAKILKSLHHPNIVGYRAFTEANDGSLCLAMEYGGEKSLNDLIEERYKASQDPFPAAIILKVALNMARGLKYLHQEKKLLHGDIKSSNVVIKGDFETIKICDVGVSLPLDENMTVTDPEACYIGTEPWKPKEAVEENGVITDKADIFAFGLTLWEMMTLSIPHINLSNDDDDEDKTFDESDFDDEAYYAALGTRPPINMEELDESYQKVIELFSVCTNEDPKDRPSAAHIVEALETDV

SEQ ID NO: 386 - DNA, 1899 bp, Homo sapiens
agcgcgcgactttttgaaagccaggagggttcgaattgcaacggcagctgccgggcgtatgtgttggtgctagaggcagctgcagggtctcgctgggggccgctcgggaccaattttgaagaggtacttggccacgacttattttcacctccgacctttccttccaggcggtgagactctggactgagagtggctttcacaatggaagggatcagtaatttcaagacaccaagcaaattatcagaaaaaaagaaatctgtattatgttcaactccaactataaatatcccggcctctccgtttatgcagaagcttggctttggtactggggtaaatgtgtacctaatgaaaagatctccaagaggtttgtctcattctccttgggctgtaaaaaagattaatcctatatgtaatgatcattatcgaagtgtgtatcaaaagagactaatggatgaagctaagattttgaaaagccttcatcatccaaacattgttggttatcgtgcttttactgaagccaatgatggcagtctgtgtcttgctatggaatatggaggtgaaaagtctctaaatgacttaatagaagaacgatataaagccagccaagatccttttccagcagccataattttaaaagttgctttgaatatggcaagagggttaaagtatctgcaccaagaaaagaaactgcttcatggagacataaagtcttcaaatgttgtaattaaaggcgattttgaaacaattaaaatctgtgatgtaggagtctctctaccactggatgaaaatatgactgtgactgaccctgaggcttgttacattggcacagagccatggaaacccaaagaagctgtggaggagaatggtgttattactgacaaggcagacatatttgcctttggccttactttgtgggaaatgatgactttatcgattccacacattaatctttcaaatgatgatgatgatgaagataaaacttttgatgaaagtgattttgatgatgaagcatactatgcagcgttgggaactaggccacctattaatatggaagaactggatgaatcataccagaaagtaattgaactcttctctgtatgcactaatgaagaccctaaagatcgtccttctgctgcacacattgttgaagctctggaaacagatgtctagtgatcatctcagctgaagtgtggcttgcgtaaataactgtttattccaaaatatttacatagttactatcagtagttattagactctaaaattggcatatttgaggaccatagtttcttgttaacatatggataactatttctaatatgaaatatgcttatattggctataagcacttggaattgtactgggttttctgtaaagttttagaaactagctacataagtactttgatactgctcatgctgacttaaaacactagcagtaaaacgctgtaaactgtaacattaaattgaatgaccattacttttattaatgatctttcttaaatattctatattttaatggatctactgacattagcactttgtacagtacaaaataaagtctacatttgtttaaaacactgaaccttttgctgatgtgtttatcaaatgataactggaagctgaggagaatatgcctcaaaaagagtagctccttggatacttcagactctggttacagattgtcttgatctcttggatctcctcagatctttggtttttgctttaatttattaaatgtattttccatactgagtttaaaatttattaatttgtaccttaagcatttcccagctgtgtaaaaacaataaaactcaaataggatgataaagaataaaggacactttgggtaccagaaaaaaaaaaaaaaaaaaaaaaaaaaaaaaaaaaaaaaaaaaaaaaa

SEQ ID NO: 387 - protein, 202 aa, Homo sapiens; identical to SEQ ID NO: 345

SEQ ID NO: 388 - DNA, 728 bp, Homo sapiens
gcggcctcagatgaatgcggctgttaagacctgcaataatccagaatggctactctgatctatgttgataaggaaaatggagaaccaggcacccgtgtggttgctaaggatgggctgaagctggggtctggaccttcaatcaaagccttagatgggagatctcaagtttcaacaccacgttttggcaaaacgttcgatgccccaccagccttacctaaagctactagaaaggctttgggaactgtcaacagagctacagaaaagtctgtaaagaccaagggacccctcaaacaaaaacagccaagcttttctgccaaaaagatgactgagaagactgttaaagcaaaaagctctgttcctgcctcagatgatgcctatccagaaatagaaaaattctttcccttcaatcctctagactttgagagttttgacctgcctgaagagcaccagattgcgcacctccccttgagtggagtgcctctcatgatccttgacgaggagagagagcttgaaaagctgtttcagctgggccccccttcacctgtgaagatgccctctccaccatgggaatccaatctgttgcagtctccttcaagcattctgtcgaccctggatgttgaattgccacctgtttgctgtgacatagatatttaaatttcttagtgcttcagagtttgtgtgtatttgtattaataaagcattcttcaacagaaaaaaaaaaaaaaaaa

SEQ ID NO: 389 - protein, 221 aa, Homo sapiens
MSETAPLAPTIPAPAEKTPVKKKAKKAGATAGKRKASGPPVSELITKAVAASKERSGVSLAALKKALAAAGYDVEKNNSRIKLGLKSLVSKGTLVQTKGTGASGSFKLNKKAASGEGKPKAKKAGAAKPRKPAGAAKKPKKVAGAATPKKSIKKTPKKVKKPATAAGTKKVAKSAKKVKTPQPKKAAKSPAKAKAPKPKAAKPKSGKPKVTKAKKAAPKKK

SEQ ID NO: 390 - DNA, 777 bp, Homo sapiens
catgctgttctgacagtttgagattacttattgtcttttctgggaagacaaaaacatgtcggagactgctccacttgctcctaccattcctgcacccgcagaaaaaacacctgtgaagaaaaaggcgaagaaggcaggcgcaactgctgggaaacgcaaagcatccggacccccagtatctgagcttatcaccaaggcagtggcagcttctaaggagcgcagcggcgtttctctggccgcgcttaagaaagcgcttgcggctgctggctacgatgtagaaaaaaacaacagccgtatcaagcttggcctcaagagcttggtgagcaaaggtactctggtgcagaccaaaggtaccggtgcttctggctccttcaaactcaacaagaaagcggcttccggggaaggcaaacccaaggccaaaaaggctggcgcagccaagcctaggaagcctgctggggcagccaagaagcccaagaaggtggctggcgccgctaccccgaagaaaagcatcaaaaagactcctaagaaggtaaagaagccagcaaccgctgctgggaccaagaaagtggccaagagtgcgaaaaaggtgaaaacacctcagccaaaaaaagctgccaagagtccagctaaggccaaagcccctaagcccaaggcggccaagcctaagtcggggaagccgaaggttacaaaggcaaagaaggcagctccgaagaaaaagtgaaactggcgggacgttcccctttgaaaattttaaacggctcttttcagagccaccca

SEQ ID NO: 391 - protein, 846 aa, Homo sapiens; identical to SEQ ID NO: 355

SEQ ID NO: 392 - DNA, 2979 bp, Homo sapiens; identical to SEQ ID NO: 356

SEQ ID NO: 393 - protein, 450 aa, Homo sapiens; identical to SEQ ID NO: 361

SEQ ID NO: 394 - DNA, 2824 bp, Homo sapiens; identical to SEQ ID NO: 362

SEQ ID NO: 395 - protein, 142 aa, Homo sapiens; identical to SEQ ID NO: 343

SEQ ID NO: 396 - DNA, 1619 bp, Homo sapiens; identical to SEQ ID NO: 344

SEQ ID NO: 397 - protein, 1401 aa, Homo sapiens
MAPQMYEFHLPLSPEELLKSGGVNQYVVQEVLSIKHLPPQLRAFQAAFRAQGPLAMLQHFDTIYSILHHFRSIDPGLKEDTLEFLIKVVSRHSQELPAILDDTTLSGSDRNAHLNALKMNCYALIRLLESFETMASQTNLVDLDLGGKGKKARTKAAHGFDWEEERQPILQLLTQLLQLDIRHLWNHSIIEEEFVSLVTGCCYRLLENPTINHQKNRPTREAITHLLGVALTRYNHMLSATVKIIQMLQHFEHLAPVLVAAVSLWATDYGMKSIVGEIVREIGQKCPQELSRDPSGTKGFAAFLTELAERVPAILMSSMCILLDHLDGENYMMRNAVLAAMAEMVLQVLSGDQLEAAARDTRDQFLDTLQAHGHDVNSFVRSRVLQLFTRIVQQKALPLTRFQAVVALAVGRLADKSVLVCKNAIQLLASFLANNPFSCKLSDADLAGPLQKETQKLQEMRAQRRTAAASAVLDPEEEWEAMLPELKSTLQQLLQLPQGEEEIPEQIANTETTEDVKGRIYQLLAKASYKKAIILTREATGHFQESEPFSHIDPEESEETRLLNILGLIFKGPAASTQEKNPRESTGNMVTGQTVCKNKPNMSDPEESRGNDELVKQEMLVQYLQDAYSFSRKITEAIGIISKMMYENTTTVVQEVIEFFVMVFQFGVPQALFGVRRMLPLIWSKEPGVREAVLNAYRQLYLNPKGDSARAKAQALIQNLSLLLVDASVGTIQCLEEILCEFVQKDELKPAVTQLLWERATEKVACCPLERCSSVMLLGMMARGKPEIVGSNLDTLVSIGLDEKFPQDYRLAQQVCHAIANISDRRKPSLGKRHPPFRLPQEHRLFERLRETVTKGFVHPDPLWIPFKEVAVTLIYQLAEGPEVICAQILQGCAKQALEKLEEKRTSQEDPKESPAMLPTFLLMNLLSLAGDVALQQLVHLEQAVSGELCRRRVLREEQEHKTKDPKEKNTSSETTMEEELGLVGATADDTEAELIRGICEMELLDGKQTLAAFVPLLLKVCNNPGLYSNPDLSAAASLALGKFCMISATFCDSQLRLLFTILEKSPLPIVRSNLMVATGDLAIRFPNLVDPWTPHLYARLRDPAQQVRKTAGLVMTHLILKDMVKVKGQVSEMAVLLIDPEPQIAALAKNFFNELSHKGNAIYNLLPDIISRLSDPELGVEEEPFHTIMKQLLSYITKDKQTESLVEKLCQRFRTSLTERQQRDLAYCVSQLPLTERGLRKMLDNFDCFGDKLSDESIFSAFLSVVGKLRRGAKPEGKAIIDEFEQKLRACHTRGLDGIKELEIGQAGSQRAPSAKKPSTGSRYQPLASTASDNDFVTPEPRRTTRRHPNTQQRASKKKPKVVFSSDESSEEDLSAEMTEDETPKKTTPILRASARRHRS

SEQ ID NO: 398 - DNA, 5547 bp, Homo sapiens
aagttttggagcgccggacaagctgaggtccgcgactcgtcgctaagattccccaaaactgagatttcaagaaaattcaccctttccgctttctttggcgcccttcaaccgtgaaggaaatgaaggttgagaacctggaacccgcttccaaagaccaagccctttctctgtgcctcacaacagtcttgcgctgtagctgtttttattacccctattttactactggggaggagatttgaggtcctgaaagtgaagtgacttgctggacgtcacttagcagaggagatggcgaaacctggattagaggcgatgccttctaactcccagcgtggacttgcctcctttcctgggggtgactgaatgcccagccagggacgcgacgtctctggccagcagaaatacggcctcctccccgccgactgggcaaagggggaccttgcggccaaggagggattcgcaggcgggccgggggtgggagcgggggccggagccggagccttggcccgcccccgggcggcgctgtgattggccggccgctccggcgggcgtcgcgattggccgtcctgcagccgttgagatttgaactcggtatttgtggctttgcccgcgcgttgccagactcagaggcggccctttgcctctgcctgccggggattggccggattctccgccgacttgaaaactgccttgctaattggtgcgtgttgtgcacgcgtgttttttccttttcatttcagcctgactgccggaatcagagccgcgggtgagatccccagccctgtgagcctgtaggagtagaatggctccccaaatgtatgagttccatctgccattatccccagaggagttgttgaaaagtggaggggtgaatcagtatgttgtgcaagaggtactgtccatcaaacatcttccaccacagcttagagcttttcaggctgcctttcgagctcaggggcccctggctatgctgcagcactttgatactatctacagcattttgcatcactttcgaagtatagatcctggcctcaaagaagatactctggaattcctgataaaagtggtatcccgccactcccaggagcttccagctatcctggatgatacaactttgagtggatcagatagaaacgcccatctaaatgccctcaaaatgaactgttatgctctgatacgtctcctggaatcctttgagaccatggccagccagacaaaccttgtggacctggaccttggtgggaagggtaagaaagctcggaccaaggcagcccatggctttgactgggaagaagagaggcaaccaattcttcagcttttaacacagctacttcagttggacatccgtcacctgtggaaccactcaataattgaagaagaatttgtcagtttggttactggctgttgctaccgccttctggagaatcccaccattaatcaccagaagaaccgccccactcgggaagccataacacacctgcttggtgtagccttgacccgttataaccatatgctcagtgctacagtgaagatcatccagatgctgcagcactttgaacacctggcacctgtactggttgcagccgtgagtctatgggcaactgactatggaatgaagagcatagtgggagagattgtaagagagattggacaaaagtgtccccaagagctgagtcgagacccttcagggacaaagggctttgcagcattcctgacagaactagcagaacgtgtcccagctatcctgatgtccagcatgtgcattttgctagatcacctggatggagaaaattacatgatgcgtaatgctgtgctggcagccatggcggagatggtgctgcaggttctcagtggcgatcaactggaagcagcagcccgagacaccagagaccagttcttggatactttacaagcccatggccatgatgtcaactcctttgtgcggagccgtgttttgcagctcttcacccgaattgtccagcagaaggctctccccctgacacgtttccaggcagtggtggctttagctgtgggacgtctggcagacaagtcagtgctagtatgtaaaaatgccatccagctgctggccagttttctagccaataatcctttctcctgcaagcttagtgatgctgaccttgccggaccactgcagaaggagacccagaaattacaagagatgagggcccagaggcgaactgcagcagcttctgcagtgctggacccagaggaggagtgggaagccatgctgccagagttgaagtctaccctgcagcagcttctacagcttccccagggagaggaggagattcctgagcaaattgccaatacagagacaactgaagatgtgaaaggacgcatctatcaactgcttgccaaagctagttacaaaaaggccatcattctcactcgagaagccacaggccacttccaggagtccgaacccttcagtcatatagacccagaggagtcagaggagaccaggctcttgaatatattaggacttatcttcaaaggcccagcagcttccacacaagaaaagaatccccgggagtctacaggaaacatggtcacaggacagactgtctgtaaaaataaacccaatatgtcggatcctgaggaatccaggggaaatgatgaactagtgaagcaggagatgctggtacagtatctgcaggatgcctacagcttctcccggaagattacagaggccattggcatcatcagcaagatgatgtatgaaaacacaactacagtggtgcaggaggtgattgaattctttgtgatggtcttccaatttggggtaccccaggccctgtttggggtgcgccgtatgctgcctctcatctggtctaaggagcctggtgtccgggaagccgtgcttaatgcctaccgccaactctacctcaaccccaaaggggactctgccagagccaaggcccaggctttgattcagaatctctctctgctgctagtggatgcctcggttgggaccattcagtgtcttgaggaaattctctgtgagtttgtgcagaaggatgagttgaaaccagcagtgacccagctgctgtgggagcgggccaccgagaaggtcgcctgctgtcctctggagcgctgttcctctgtcatgcttcttggcatgatggcacgaggaaagccagaaattgtgggaagcaatttagacacactggtgagcatagggctggatgagaagtttccacaggactacaggctggcccagcaggtgtgccatgccattgccaacatctcggacaggagaaagccttctctgggcaaacgtcacccccccttccggctgcctcaggaacacaggttgtttgagcgactgcgggagacagtcacaaaaggctttgtccacccagacccactctggatcccattcaaagaggtggcagtgaccctcatttaccaactggcagagggccccgaagtgatctgtgcccagatattgcagggctgtgcaaaacaggccctggagaagctagaagagaagagaaccagtcaggaggacccgaaggagtcccccgcaatgctccccactttcctgttgatgaacctgctgtccctggctggggatgtggctctgcagcagctggtccacttggagcaggcagtgagtggagagctctgccggcgccgagttctccgggaagaacaggagcacaagaccaaagatcccaaggagaagaatacgagctctgagaccaccatggaggaggagctggggctggttggggcaacagcagatgacacagaggcagaactaatccgtggcatctgcgagatggaactgttggatggcaaacagacactggctgcctttgttccactcttgcttaaagtctgtaacaacccaggcctctatagcaacccagacctctctgcagctgcttcacttgcccttggcaagttctgcatgatcagtgccactttctgcgactcccagcttcgtcttctgttcaccatcctggaaaagtctccacttcccattgtccggtctaacctcatggttgccactggggatctggccatccgctttcccaatctggtggacccctggactcctcatctgtatgctcgcctccgggaccctgctcagcaagtgcggaaaacagcggggctggtgatgacccacctgatcctcaaggacatggtgaaggtgaaggggcaggtcagcgagatggcggtgctgctcatcgaccccgagcctcagattgctgccctggccaagaacttcttcaatgagctctcccacaagggcaacgcaatctataatctccttccagatatcatcagccgcctgtcagaccccgagctgggggtggaggaagagcctttccacaccatcatgaaacagctcctctcctacatcaccaaggacaagcagacagagagcctggtggaaaagctgtgtcagcggttccgcacatccctaactgagcggcagcagcgagacctggcctactgtgtgtcacagctgcccctcacagagcgaggcctccgtaagatgcttgacaattttgactgttttggagacaaactgtcagatgagtccatcttcagtgcttttttgtcagttgtaggcaagctgcgacgtggggccaagcctgagggcaaggctataatagatgaatttgagcagaagcttcgggcctgtcataccagaggtttggatggaatcaaggagcttgagattggccaagcaggtagccagagagcgccatcagccaagaaaccatccactggttctaggtaccagcctctggcttctacagcctcagacaatgactttgtcacaccagagccccgccgtactacccgtcggcatccaaacacccagcagcgagcttccaaaaagaaacccaaagttgtcttctcaagtgatgagtccagtgaggaagatctttcagcagagatgacagaagacgagacacccaagaaaacaactcccattctcagagcatcggctcgcaggcacagatcctaggaagtctgttcctgtcctccctgtgcagggtatcctgtagggtgacctggaattcgaattctgtttcccttgtaaaatatttgtctgtctcttttttttaaaaaaaaaaaaggccgggcactgtggctcacgcctgtaatcccagcactttgcgataccaaggcgggtggataacctgaggtagggagttcgagaccagcctgaccaacatggagaaaccccatctctactaaaaataaaaaattagccgggcgtattggcgtgcgcctgtaatcccagctactcaagaggctgaggcaggagaatcgcctgaacccagaggcggaggttgtagtgagccgaaatcacaccattgcactccagcttgggcaacaatagcgaacctccatctcaaattaaaaaaaaaatgcctacacgctctttaaaatgcaaggctttctcttaaattagcctaactgaactgcgttgagctgcttcaactttggaatatatgtttgccaatctccttgttttctaatgaataaatgtttttatatactttt

SEQ ID NO: 399 - protein, 213 aa, Homo sapiens; identical to SEQ ID NO: 3

SEQ ID NO: 400 - DNA, 2167 bp, Homo sapiens
gaagctgcctccgccatcttggagatgggagacgggcgatggctgtggtccttctgctaatgcaaacaacaaaacgggcacactagtcacccccgagggaggccaccatcactgtaactgttggccaaagctacaaaagaagcgagggaatccaaccgagcgcagcgacactgagaacagcttcccctgccttctgcggcggcagaagtgaagtgcctgaggaccggaaggatggtgcagtcctgctccgcctacggctgcaagaaccgctacgacaaggacaagcccgtttctttccacaagtttcctcttactcgacccagtctttgtaaagaatgggaggcagctgtcagaagaaaaaactttaaacccaccaagtatagcagtatttgttcagagcactttactccagactgctttaagagagagtgcaacaacaagttactgaaagagaatgctgtgcccacaatatttctttgtactgagccacatgacaagaaagaagatcttctggagccacaggaacagcttcccccacctcctttaccgcctcctgtttcccaggttgatgctgctattggattactaatgccgcctcttcagacccctgttaatctctcagttttctgtgaccacaactatactgtggaggatacaatgcaccagcggaaaaggattcatcagctagaacagcaagttgaaaaactcagaaagaagctcaagaccgcacagcagcgatgcagaaggcaagaacggcagcttgaaaaattaaaggaggttgttcacttccagaaagagaaagacgacgtatcagaaagaggttatgtgattctaccaaatgactactttgaaatagttgaagtaccagcataaaaaaatgaaatgtgtattgatttctaatggggcaataccacatatcctcctctagcctgtaaaggagtttcatttaaaaaaataacatttgattacttatataaaaacagttcagaatatttttttaaaaaaaattctatatatactgtaaaattataaatttttttgtttgtaatttcaggttttttacattttaacaaaatattttaaaagttataaactaacctcagacctctaatgtaagttggtttcaagattggggattttggggtttttttttttagtatttatagaaataatgtaaaaataaaaagtaaagagaatgagaacagtgtggtaaaagggagatttcagtttaaaacttaaaattagtactgttttattgagagaatttagttatattttaaatcagaagtatgggtcagatcatgggacataacttcttagaatatatatatacatatgtacatattctcatatgtaaagtcacaaggttcatttatctttctgaatcagttatcaaagataaattggcaagtcagtacttaagaaaaaagatttgattatcatcacagcagaaaaaagtcattgcatatctgatcaataacttcagattctaagagtggatttttttttttttacatgggctcctattttttcccctactgtcttgcattataaaattagaagtgtattttcagtggaagaaacatttttcaataaataaagtaaggcattgtcatcaatgaagtaattaaaactgggacctgatctatgatacgcttttttctttcattacaccctagctgaaggacatccagttccccagctgtagttatgtatctgccttcaagtctctgacaaatgtgctgtgttagtagagtttgatttgtatcatatgataatcttgcacttgactgagttgggacaaggcttcacataaaaaattatttcttcacttttaacacaagttagaaattatatcccatttagttaaatgcgtgatttatattcagaacaacctactatgtagcgtttattttactgaatgtggagatttaaacactgaggtttctgttcaaactgtgagttctgttctttgtgagaaattttacatatattggaagtgaaaatatgttctgagtaaacaaatattgctatgggagttatctttttagatttagaataactgttccaatgataattattacttttatatttcaaagtacactaagatcgttgaagagcaatagaacctttaagacagtattaaaggtgtgaagcaatggcattc

SEQ ID NO: 401 - protein, 823 aa, Homo sapiens; identical to SEQ ID NO: 351

SEQ ID NO: 402 - DNA, 2903 bp, Homo sapiens; identical to SEQ ID NO: 352

SEQ ID NO: 403 - protein, 205 aa, Homo sapiens; identical to SEQ ID NO: 349

SEQ ID NO: 404 - DNA, 1390 bp, Homo sapiens; identical to SEQ ID NO: 350

SEQ ID NO: 405 - protein, 464 aa, Homo sapiens
METLSFPRYNVAEIVIHIRNKILTGADGKNLTKNDLYPNPKPEVLHMIYMRALQIVYGIRLEHFYMMPVNSEVMYPHLMEGFLPFSNLVTHLDSFLPICRVNDFETADILCPKAKRTSRFLSGIINFIHFREACRETYMEFLWQYKSSADKMQQLNAAHQEALMKLERLDSVPVEEQEEFKQLSDGIQELQQSLNQDFHQKTIVLQEGNSQKKSNISEKTKRLNELKLLVVSLKEIQESLKTKIVDSPEKLKNYKEKMKDTVQKLKNARQEVVEKYEIYGDSVDCLPSCQLEVQLYQKKIQDLSDNREKLASILKESLNLEDQIESDESELKKLKTEENSFKRLMIVKKEKLATAQFKINKKHEDVKQYKRTVIEDCNKVQEKRGAVYERVTTINQEIQKIKLGIQQLKDAAEREKLKSQEIFLNLKTALEKYHDGIEKAAEDSYAKIDEKTAELKRKMFKMST

SEQ ID NO: 406 - DNA, 1857 bp, Homo sapiens
ggaatggggcgggacttccagtaggaggcggcaagtttgaaaagtgatgacggttgacgtttgctgatttttgactttgcttgtagctgctccccgaactcgccgtcttcctgtcggcggccggcactgtagattaacaggaaacttccaagatggaaactttgtctttccccagatataatgtagctgagattgtgattcatattcgcaataagatcttaacaggagctgatggtaaaaacctcaccaagaatgatctttatccaaatccaaagcctgaagtcttgcacatgatctacatgagagccttacaaatagtatatggaattcgactggaacatttttacatgatgccagtgaactctgaagtcatgtatccacatttaatggaaggcttcttaccattcagcaatttagttactcatctggactcatttttgcctatctgccgggtgaatgactttgagactgctgatattctatgtccaaaagcaaaacggacaagtcggtttttaagtggcattatcaactttattcacttcagagaagcatgccgtgaaacgtatatggaatttctttggcaatataaatcctctgcggacaaaatgcaacagttaaacgccgcacaccaggaggcattaatgaaactggagagacttgattctgttccagttgaagagcaagaagagttcaagcagctttcagatggtattcaggagctacaacaatcactaaatcaggattttcatcaaaaaacgatagtgctgcaagagggaaattcccaaaagaagtcaaatatttcagagaaaaccaagcgtttgaatgaactaaaattgttggtggtttctttgaaagaaatacaagagagtttgaaaacaaaaattgtggattctccagagaagttaaagaattataaagaaaaaatgaaagatacggtccagaagcttaaaaatgccagacaagaagtggtggagaaatatgaaatctatggagactcagttgactgcctgccttcatgtcagttggaagtgcagttatatcaaaagaaaatacaggacctttcagataatagggaaaaattagccagtatcttaaaggagagcctgaacttggaggaccaaattgagagtgatgagtcagaactgaagaaattgaagactgaagaaaattcgttcaaaagactgatgattgtgaagaaggaaaaacttgccacagcacaattcaaaataaataagaagcatgaagatgttaagcaatacaaacgcacagtaattgaggattgcaataaagttcaagaaaaaagaggtgctgtctatgaacgagtaaccacaattaatcaagaaatccaaaaaattaaacttggaattcaacaactaaaagatgctgctgaaagggagaaactgaagtcccaggaaatatttctaaacttgaaaactgctttggagaaataccacgacggtattgaaaaggcagcagaggactcctatgctaagatagatgagaagacagctgaactgaagaggaagatgttcaaaatgtcaacctgattaacaaaattacatgtctttttgtaaatggcttgccatcttttaattttctatttagaaagaaaagttgaagcgaatggaagtatcagaagtaccaaataatgttggcttcatcagtttttatacactctcataagtagttaataagatgaatttaatgtaggcttttattaatttataattaaaataacttgtgcagctattcatgtctctactctgccccttgttgtaaatagtttgagtaaaacaaaactagttacctttgaaatatatatatttttttctgttaaaaaaaaaaaaaaaaaaaaaa

SEQ ID NO: 407 - protein, 1050 aa, Homo sapiens
MAAVKKEGGALSEAMSLEGDEWELSKENVQPLRQGRIMSTLQGALAQESACNNTLQQQKRAFEYEIRFYTGNDPLDVWDRYISWTEQNYPQGGKESNMSTLLERAVEALQGEKRYYSDPRFLNLWLKLGRLCNEPLDMYSYLHNQGIGVSLAQFYISWAEEYEARENFRKADAIFQEGIQQKAEPLERLQSQHRQFQARVSRQTLLALEKEEEEEVFESSVPQRSTLAELKSKGKKTARAPIIRVGGALKAPSQNRGLQNPFPQQMQNNSRITVFDENADEASTAELSKPTVQPWIAPPMPRAKENELQAGPWNTGRSLEHRPRGNTASLIAVPAVLPSFTPYVEETAQQPVMTPCKIEPSINHILSTRKPGKEEGDSLQRVQSHQQASEEKKEKMMYCKEKIYAGVGEFSFEEIRAEVFRKKLKEQREAELLTSAEKRAEMQKQIEEMEKKLKEIQTTQQERTGDQQEETMPTKETTKLQIASESQKIPGMTLSSSVCQVNCCARETSLAENIWQEQPHSKGPSVPFSIFDEFLLSEKKNKSPPADPPRVLAQRRPLAVLKTSESITSNEDVSPDVCDEFTGIEPLSEDAIITGFRNVTICPNPEDTCDFARAARFVSTPFHEIMSLKDLPSDPERLLPEEDLDVKTSEDQQTACGTIYSQTLSIKKLSPIIEDSREATHSSGFSGSSASVASTSSIKCLQIPEKLELTNETSENPTQSPWCSQYRRQLLKSLPELSASAELCIEDRPMPKLEIEKEIELGNEDYCIKREYLICEDYKLFWVAPRNSAELTVIKVSSQPVPWDFYINLKLKERLNEDFDHFCSCYQYQDGCIVWHQYINCFTLQDLLQHSEYITHEITVLIIYNLLTIVEMLHKAEIVHGDLSPRCLILRNRIHDPYDCNKNNQALKIVDFSYSVDLRVQLDVFTLSGFRTVQILEGQKILANCSSPYQVDLFGIADLAHLLLFKEHLQVFWDGSFWKLSQNISELKDGELWNKFFVRILNANDEATVSVLGELAAEMNGVFDTTFQSHLNKALWKVGKLTSPGALLFQ

SEQ ID NO: 408 - DNA, 3702 bp, Homo sapiens
gtttgttagggagtcgtgtgcgtgccttggtcgcttctgtagctccgagggcaggttgcggaagaaagcccaggcggtctgtggcccagaggaaaggcctgcagcaggacgaggacctgagccaggaatgcaggatggcggcggtgaagaaggaagggggtgctctgagtgaagccatgtccctggagggagatgaatgggaactgagtaaagaaaatgtacaacctttaaggcaagggcggatcatgtccacgcttcagggagcactggcacaagaatctgcctgtaacaatactcttcagcagcagaaacgggcatttgaatatgaaattcgattttacactggaaatgaccctctggatgtttgggataggtatatcagctggacagagcagaactatcctcaaggtgggaaggagagtaatatgtcaacgttattagaaagagctgtagaagcactacaaggagaaaaacgatattatagtgatcctcgatttctcaatctctggcttaaattagggcgtttatgcaatgagcctttggatatgtacagttacttgcacaaccaagggattggtgtttcacttgctcagttctatatctcatgggcagaagaatatgaagctagagaaaactttaggaaagcagatgcgatatttcaggaagggattcaacagaaggctgaaccactagaaagactacagtcccagcaccgacaattccaagctcgagtgtctcggcaaactctgttggcacttgagaaagaagaagaggaggaagtttttgagtcttctgtaccacaacgaagcacactagctgaactaaagagcaaagggaaaaagacagcaagagctccaatcatccgtgtaggaggtgctctcaaggctccaagccagaacagaggactccaaaatccatttcctcaacagatgcaaaataatagtagaattactgtttttgatgaaaatgctgatgaggcttctacagcagagttgtctaagcctacagtccagccatggatagcaccccccatgcccagggccaaagagaatgagctgcaagcaggcccttggaacacaggcaggtccttggaacacaggcctcgtggcaatacagcttcactgatagctgtacccgctgtgcttcccagtttcactccatatgtggaagagactgcacaacagccagttatgacaccatgtaaaattgaacctagtataaaccacatcctaagcaccagaaagcctggaaaggaagaaggagattctctacaaagggttcagagccatcagcaagcgtctgaggagaagaaagagaagatgatgtattgtaaggagaagatttatgcaggagtaggggaattctcctttgaagaaattcgggctgaagttttccggaagaaattaaaagagcaaagggaagccgagctattgaccagtgcagagaagagagcagaaatgcagaaacagattgaagagatggagaagaagctaaaagaaatccaaactactcagcaagaaagaacaggtgatcagcaagaagagacgatgcctacaaaggagacaactaaactgcaaattgcttccgagtctcagaaaataccaggaatgactctatccagttctgtttgtcaagtaaactgttgtgccagagaaacttcacttgcggagaacatttggcaggaacaacctcattctaaaggtcccagtgtacctttctccatttttgatgagtttcttctttcagaaaagaagaataaaagtcctcctgcagatcccccacgagttttagctcaacgaagaccccttgcagttctcaaaacctcagaaagcatcacctcaaatgaagatgtgtctccagatgtttgtgatgaatttacaggaattgaacccttgagcgaggatgccattatcacaggcttcagaaatgtaacaatttgtcctaacccagaagacacttgtgactttgccagagcagctcgttttgtatccactccttttcatgagataatgtccttgaaggatctcccttctgatcctgagagactgttaccggaagaagatctagatgtaaagacctctgaggaccagcagacagcttgtggcactatctacagtcagactctcagcatcaagaagctgagcccaattattgaagacagtcgtgaagccacacactcctctggcttctctggttcttctgcctcggttgcaagcacctcctccatcaaatgtcttcaaattcctgagaaactagaacttactaatgagacttcagaaaaccctactcagtcaccatggtgttcacagtatcgcagacagctactgaagtccctaccagagttaagtgcctctgcagagttgtgtatagaagacagaccaatgcctaagttggaaattgagaaggaaattgaattaggtaatgaggattactgcattaaacgagaatacctaatatgtgaagattacaagttattctgggtggcgccaagaaactctgcagaattaacagtaataaaggtatcttctcaacctgtcccatgggacttttatatcaacctcaagttaaaggaacgtttaaatgaagattttgatcatttttgcagctgttatcaatatcaagatggctgtattgtttggcaccaatatataaactgcttcacccttcaggatcttctccaacacagtgaatatattacccatgaaataacagtgttgattatttataaccttttgacaatagtggagatgctacacaaagcagaaatagtccatggtgacttgagtccaaggtgtctgattctcagaaacagaatccacgatccctatgattgtaacaagaacaatcaagctttgaagatagtggacttttcctacagtgttgaccttagggtgcagctggatgtttttaccctcagcggctttcggactgtacagatcctggaaggacaaaagatcctggctaactgttcttctccctaccaggtagacctgtttggtatagcagatttagcacatttactattgttcaaggaacacctacaggtcttctgggatgggtccttctggaaacttagccaaaatatttctgagctaaaagatggtgaattgtggaataaattctttgtgcggattctgaatgccaatgatgaggccacagtgtctgttcttggggagcttgcagcagaaatgaatggggtttttgacactacattccaaagtcacctgaacaaagccttatggaaggtagggaagttaactagtcctggggctttgctctttcagtgagctaggcaatcaagtctcacagattgctgcctcagagcaatggttgtattgtggaacactgaaactgtatgtgctgtaatttaatttaggacacatttagatgcactaccattgctgttctactttttggtacaggtatattttgacgtcactgatattttttatacagtgatatacttactcatggccttgtctaacttttgtgaagaactattttattctaaacagactcattacaaatggttaccttgttatttaacccatttgtctctacttttccctgtacttttcccatttgtaatttgtaaaatgttctcttatgatcaccatgtattttgtaaataataaaatagtatctgttaaaaaaaaaaaaaaaaaaaaaaaaaaaaaaaaaaaaaaaaaaaaaaaaaaaaaa

SEQ ID NO: 409 - protein, 164 aa, Homo sapiens
MPCSEETPAISPSKRARPAEVGGMQLRFARLSEHATAPTRGSARAAGYDLYSAYDYTIPPMEKAVVKTDIQIALPSGCYGRVAPRSGLAAKHFIDVGAGVIDEDYRGNVGVVLFNFGKEKFEVKKGDRIAQLICERIFYPEIEEVQALDDTERGSGGFGSTGKN

SEQ ID NO: 410 - DNA, 1816 bp, Homo sapiens
ctcgccttctggctctgccatgccctgctctgaagagacacccgccatttcacccagtaagcgggcccggcctgcggaggtgggcggcatgcagctccgctttgcccggctctccgagcacgccacggcccccacccggggctccgcgcgcgccgcgggctacgacctgtacagtgcctatgattacacaataccacctatggagaaagctgttgtgaaaacggacattcagatagcgctcccttctgggtgttatggaagagtggctccacggtcaggcttggctgcaaaacactttattgatgtaggagctggtgtcatagatgaagattatagaggaaatgttggtgttgtactgtttaattttggcaaagaaaagtttgaagtcaaaaaaggtgatcgaattgcacagctcatttgcgaacggattttttatccagaaatagaagaagttcaagccttggatgacaccgaaaggggttcaggaggttttggttccactggaaagaattaaaatttatgccaagaacagaaaacaagaagtcatacctttttcttaaaaaaaaaaaaaaagtttttgcttcaagtgttttggtgttttgcacttctgtaaacttactagctttaccttctaaaagtactgcattttttacttttttttatgatcaaggaaaagatcgttaaaaaaaaacacaaagaagtttttctttgtgtttggatcaaaaagaaactttgtttttccgcaattgaaggttgtatgtaaatctgctttgtggtgacctgatgtaaacagtgtcttcttaaaatcaaatgtaaatcaattacagattaaaaaaaaaagcctgtatttaactcatatgatctcccttcagcaacttattttgctttaattgctttaaatcttaagcaatattttttattcagtaaacaaattctttcacaaggtacaaaatcttgcataagctgaactaaaataaaaatgaaaaggagagattaaaggtattccttgttcttcccttctcttcactagtctaaaaacttctttttaatcttaagattctttgtgatgagggtgagaaaaagaatcctcagtttatttttccactattaatctttcttttgataaatcctctattgactgggtagaggtatgtttgtgaaagacatgtaacttggggatttgttactttaggtttgttcccttgaatttcatctcatcaggcaaattgtactagttgtagttacgagttttccctcagtgaagtagcaataggctgtaatcaagaaaatatgccatttatagagataagataaatgaaataatacttcagccaccaggtttttctgtctcacatacataagcagcatttcattgcagatatgggactgattctgtggcttaccttgattaacatcttttggaagttttgctagtgtgctttcctttctttactatgtttctcagattcctttgtatcagggttttgggtgtcacttaggttttgtccatcagattctgtgagacaccaggcatcgttttgaggatgtgggttatacacatggagtgcttctggaactatcagcccacttgaccacccagtttgtggaagcacaggcaagagtgttcttttctggtgattctccaggccatttaataccctgcaatgtaattgtccctctgtggctcacatttcattagtgagccatgaaatcaactcagtgggacatagccagcatttttgcataccaggttgggctataaaatatttctgttgtcaataaattttaaatgttttcctgctaaaaaaaaaaaaaa

SEQ ID NO: 411 - protein, 1388 aa, Homo sapiens
MAPGCKTELRSVTNGQSNQPSNEGDAIKVFVRIRPPAERSGSADGEQNLCLSVLSSTSLRLHSNPEPKTFTFDHVADVDTTQESVFATVAKSIVESCMSGYNGTIFAYGQTGSGKTFTMMGPSESDNFSHNLRGVIPRSFEYLFSLIDREKEKAGAGKSFLCKCSFIEIYNEQIYDLLDSASAGLYLREHIKKGVFVVGAVEQVVTSAAEAYQVLSGGWRNRRVASTSMNRESSRSHAVFTITIESMEKSNEIVNIRTSLLNLVDLAGSERQKDTHAEGMRLKEAGNINRSLSCLGQVITALVDVGNGKQRHVCYRDSKLTFLLRDSLGGNAKTAIIANVHPGSRCFGETLSTLNFAQRAKLIKNKAVVNEDTQGNVSQLQAEVKRLKEQLAELASGQTPPESFLTRDKKKTNYMEYFQEAMLFFKKSEQEKKSLIEKVTQLEDLTLKKEKFIQSNKMIVKFREDQIIRLEKLHKESRGGFLPEEQDRLLSELRNEIQTLREQIEHHPRVAKYAMENHSLREENRRLRLLEPVKRAQEMDAQTIAKLEKAFSEISGMEKSDKNQQGFSPKAQKEPCLFANTEKLKAQLLQIQTELNNSKQEYEEFKELTRKRQLELESELQSLQKANLNLENLLEATKACKRQEVSQLNKIHAETLKIITTPTKAYQLHSRPVPKLSPEMGSFGSLYTQNSSILDNDILNEPVPPEMNEQAFEAISEELRTVQEQMSALQAKLDEEEHKNLKLQQHVDKLEHHSTQMQELFSSERIDWTKQQEELLSQLNVLEKQLQETQTKNDFLKSEVHDLRVVLHSADKELSSVKLEYSSFKTNQEKEFNKLSERHMHVQLQLDNLRLENEKLLESKACLQDSYDNLQEIMKFEIDQLSRNLQNFKKENETLKSDLNNLMELLEAEKERNNKLSLQFEEDKENSSKEILKVLEAVRQEKQKETAKCEQQMAKVQKLEESLLATEKVISSLEKSRDSDKKVVADLMNQIQELRTSVCEKTETIDTLKQELKDINCKYNSALVDREESRVLIKKQEVDILDLKETLRLRILSEDIERDMLCEDLAHATEQLNMLTEASKKHSGLLQSAQEELTKKEALIQELQHKLNQKKEEVEQKKNEYNFKMRQLEHVMDSAAEDPQSPKTPPHFQTHLAKLLETQEQEIEDGRASKTSLEHLVTKLNEDREVKNAEILRMKEQLREMENLRLESQQLIEKNWLLQGQLDDIKRQKENSDQNHPDNQQLKNEQEESIKERLAKSKIVEEMLKMKADLEEVQSALYNKEMECLRMTDEVERTQTLESKAFQEKEQLRSKLEEMYEERERTSQEMEMLRKQVECLAEENGKLVGHQNLHQKIQYVVRLKKENVRLAEETEKLRAENVFLKEKKRSES

SEQ ID NO: 412 - DNA, 4775 bp, Homo sapiens
cagtcgcgcgcggtgcagtcgggaggtggaggcaccggctgcattgttttcgggatcgaggggtgagggcgctatggcacccggctgcaaaactgagttacgcagcgtgacaaatggtcagtctaaccaaccaagtaatgaaggtgatgccatcaaagtttttgtgcgaattcgtcctcctgcagaaagatctgggtcagctgatggagagcagaacttatgcttatctgtgctgtcctccacgagtctccggctgcactccaaccctgagcccaagaccttcacgtttgatcatgttgcagatgtggataccactcaggaatctgtatttgcaactgtggctaaaagcattgtggagtcttgcatgagcggttataatggtaccatctttgcatatggacagactggctcagggaagacatttactatgatgggaccatctgaatctgataatttttctcataacctgagaggagtaatcccacgaagttttgaatatttgttttccttaattgatcgtgaaaaagaaaaggctggagctggaaagagtttcctttgtaagtgttcctttattgaaatctacaacgagcagatatatgatctactggactctgcatcggctggactgtacttaagggagcatatcaagaagggagtctttgttgttggtgcggtggagcaggtggtaacctcagctgctgaagcctatcaggtgctgtctggaggatggaggaatagacgtgtggcatcaacatcaatgaacagagaatcgtctaggtctcatgccgtctttacaattacaatagagtcaatggagaaaagtaatgagattgtgaatatacggacctccctactcaacctggtggatttagcaggatctgaaaggcaaaaagatacccatgcagaagggatgagattgaaggaagcaggtaacataaatcgatcattgagctgcctgggccaagtgattacagcacttgtcgacgtgggtaatggaaaacagagacatgtttgctacagagactccaaacttaccttcttactacgggattcccttggaggtaatgccaaaacagccataattgcaaatgttcatcctggatccaggtgttttggggaaaccctatcaacacttaactttgctcaaagagccaagctgattaaaaacaaggcagtagtaaatgaagacacccaaggaaatgtgagccagctccaagctgaagtgaagaggctcaaagaacaactggcggagcttgcttcaggacagacaccaccagaaagcttcctgaccagagacaaaaagaagactaactatatggagtatttccaggaagcaatgttattctttaagaaatctgaacaggaaaagaagtctctgatagaaaaagttacccaattagaagacctcaccctcaaaaaggaaaaatttattcaatctaataaaatgattgtgaaattccgagaggatcaaataatacgcttggaaaagctccacaaggaatcccggggaggttttctgcctgaggagcaggatcgtttgctctcagaattaaggaatgagattcaaactctgcgagaacaaatagagcaccaccccagagttgcaaagtatgctatggaaaatcattccctcagggaggagaatagaagactgagattattagagcctgtgaaaagagctcaagaaatggatgcccagaccattgcaaaactagaaaaagctttctctgaaataagtggcatggagaaaagtgacaaaaatcagcaaggattttcacctaaagctcagaaagagccatgtttgtttgcaaacactgagaagttaaaagcacaactcctgcaaattcagacagagctgaataattcaaagcaagaatatgaagaattcaaagaacttactaggaaaaggcagctagaattggaatcagagcttcagtctttgcaaaaagcgaaccttaatcttgaaaaccttttggaagcaacaaaagcctgcaagcggcaagaagtttctcagctgaataaaattcatgctgaaacacttaagattataactacaccaaccaaggcctaccaacttcattcccgaccagtaccaaaattaagccctgaaatgggaagctttggctctctatacactcagaattctagcatattagataatgatatattaaatgagccagttcctcctgagatgaatgaacaagcttttgaggccatttctgaagagcttagaacagtgcaggaacaaatgagtgctcttcaagccaaactggatgaagaagagcataaaaacctaaagcttcagcagcatgttgacaaactggaacatcattctacccaaatgcaggagcttttctcatcagaaagaattgattggaccaaacagcaggaagagcttctctcacagttgaatgtccttgaaaagcagcttcaagagactcaaactaaaaatgactttttgaaaagtgaggtacatgacctgcgagtagtccttcattctgctgacaaggagctttcttcagtgaaattggaatatagttcattcaaaacgaatcaggagaaagaattcaacaaactttctgaaagacacatgcatgtacagcttcaattagataatctcaggttagaaaacgaaaagctgcttgagagcaaagcctgcctacaggattcctatgacaacttacaagaaataatgaaatttgagattgaccaactttcaagaaacctccaaaacttcaaaaaagaaaatgaaactctgaaatctgatctgaataatttgatggagcttcttgaggcagaaaaagaacgcaataacaaattatcattacagtttgaagaagataaagaaaacagttctaaagaaatcttaaaagttcttgaggctgtacgtcaggagaaacagaaagagacggccaagtgtgagcagcagatggcaaaagtacagaaactagaagagagcttgcttgctactgaaaaagtgatcagttccctggaaaagtctagagattctgataagaaagttgtagctgacctcatgaaccagatccaggagctaagaacatcggtctgtgagaaaacagaaactatagacaccctgaaacaagaactgaaggacataaattgcaaatacaactctgctttggttgacagagaagagagcagagtgttgatcaagaagcaggaagtggatattctggatctgaaagaaacccttaggctgagaatactttctgaggacatagagagggatatgctctgtgaggacctggctcatgccactgagcagctgaacatgctcacagaggcctcaaaaaaacactcggggctgctgcagtctgcccaggaagaactgaccaagaaggaagccctgattcaggaacttcagcacaagctaaaccaaaagaaagaggaagtagaacagaagaagaatgaatataacttcaaaatgaggcaactagaacatgtgatggattctgctgctgaggatccccagagtcctaagacaccacctcactttcaaacacatttggcaaaactcctggaaacacaagaacaagagatagaagatggaagagcctctaagacttctttggaacaccttgtaacaaagctaaatgaagacagagaagtcaaaaatgctgaaatcctcagaatgaaggagcagttgcgtgaaatggaaaacctacgcctggaaagtcagcagttaatagagaaaaactggctcctgcaaggtcagctggatgatattaaaagacaaaaggaaaacagtgatcagaatcatccagataatcaacagctgaagaatgaacaagaagaaagtatcaaagaaagacttgcaaaaagtaaaatagttgaagaaatgctgaaaatgaaagcagacctagaagaagtccaaagtgccctttacaacaaagagatggaatgccttagaatgactgatgaagtcgaacgaacccaaactttggagtctaaagcattccaggaaaaagaacaactgagatcaaagctggaagaaatgtatgaagaaagagagagaacatcccaggagatggaaatgttaaggaagcaggtggagtgtcttgctgaggaaaatggaaagttggtaggtcaccaaaatttgcatcagaagattcagtacgtagtgcgactaaagaaggaaaatgtcaggcttgctgaggagacagaaaagttgcgtgccgaaaatgtatttttaaaagaaaagaaaagaagtgaatcttgaggattccggtcagctacctaggcatcaccttgtttgaagatgtttcttctcttttacaagtaagacctactcctggccacttaggagagctgaatttatggaccttaattattaaatgtttataaggtggtggtaaccacctcaagtttctgatgaacattctgcatccatatacaccctgtgacagtcagcagtctgctattaagtggcctacttcaaggctttgaatcaacttaagggaaaaccttttgtctttgtaaaaataaaagcctgtagctaaggtttacagtggacattagccagatcattttcttcttagattatgccataatctcctttgattcttatggaagttctaacaatatatggtggttccaacacctgcagtgagtttaatgactgacttagtagcaggtacaagaagcaaacttgttaatatagattatttttgtattcttactttaggtattttacttgagcattttccatgactgtaaataaagccattttttaagataaaaaaaaaaaaaaaaaa

SEQ ID NO: 413 - protein, 1056 aa, Homo sapiens
MASQPNSSAKKKEEKGKNIQVVVRCRPFNLAERKASAHSIVECDPVRKEVSVRTGGLADKSSRKTYTFDMVFGASTKQIDVYRSVVCPILDEVIMGYNCTIFAYGQTGTGKTFTMEGERSPNEEYTWEEDPLAGIIPRTLHQIFEKLTDNGTEFSVKVSLLEIYNEELFDLLNPSSDVSERLQMFDDPRNKRGVIIKGLEEITVHNKDEVYQILEKGAAKRTTAATLMNAYSSRSHSVFSVTIHMKETTIDGEELVKIGKLNLVDLAGSENIGRSGAVDKRAREAGNINQSLLTLGRVITALVERTPHVPYRESKLTRILQDSLGGRTRTSIIATISPASLNLEETLSTLEYAHRAKNILNKPEVNQKLTKKALIKEYTEEIERLKRDLAAAREKNGVYISEENFRVMSGKLTVQEEQIVELIEKIGAVEEELNRVTELFMDNKNELDQCKSDLQNKTQELETTQKHLQETKLQLVKEEYITSALESTEEKLHDAASKLLNTVEETTKDVSGLHSKLDRKKAVDQHNAEAQDIFGKNLNSLFNNMEELIKDGSSKQKAMLEVHKTLFGNLLSSSVSALDTITTVALGSLTSIPENVSTHVSQIFNMILKEQSLAAESKTVLQELINVLKTDLLSSLEMILSPTVVSILKINSQLKHIFKTSLTVADKIEDQKKELDGFLSILCNNLHELQENTICSLVESQKQCGNLTEDLKTIKQTHSQELCKLMNLWTERFCALEEKCENIQKPLSSVQENIQQKSKDIVNKMTFHSQKFCADSDGFSQELRNFNQEGTKLVEESVKHSDKLNGNLEKISQETEQRCESLNTRTVYFSEQWVSSLNEREQELHNLLEVVSQCCEASSSDITEKSDGRKAAHEKQHNIFLDQMTIDEDKLIAQNLELNETIKIGLTKLNCFLEQDLKLDIPTGTTPQRKSYLYPSTLVRTEPREHLLDQLKRKQPELLMMLNCSENNKEETIPDVDVEEAVLGQYTEEPLSQEPSVDAGVDCSSIGGVPFFQHKKSHGKDKENRGINTLERSKVEETTEHLVTKSRLPLRAQINL

SEQ ID NO: 414 - DNA, 4908 bp, Homo sapiens
acctgcgtgcagtcggtcctccaggccacgcagcgcccgagagtaccagggagactccggcccctgtcggcgccaagcccctccgcccctcacagcgcccaggtccgcggccgggccttgattttttggcggggaccgtcatggcgtcgcagccaaattcgtctgcgaagaagaaagaggagaaggggaagaacatccaggtggtggtgagatgcagaccatttaatttggcagagcggaaagctagcgcccattcaatagtagaatgtgatcctgtacgaaaagaagttagtgtacgaactggaggattggctgacaagagctcaaggaaaacatacacttttgatatggtgtttggagcatctactaaacagattgatgtttaccgaagtgttgtttgtccaattctggatgaagttattatgggctataattgcactatctttgcgtatggccaaactggcactggaaaaacttttacaatggaaggtgaaaggtcacctaatgaagagtatacctgggaagaggatcccttggctggtataattccacgtacccttcatcaaatttttgagaaacttactgataatggtactgaattttcagtcaaagtgtctctgttggagatctataatgaagagctttttgatcttcttaatccatcatctgatgtttctgagagactacagatgtttgatgatccccgtaacaagagaggagtgataattaaaggtttagaagaaattacagtacacaacaaggatgaagtctatcaaattttagaaaagggggcagcaaaaaggacaactgcagctactctgatgaatgcatactctagtcgttcccactcagttttctctgttacaatacatatgaaagaaactacgattgatggagaagagcttgttaaaatcggaaagttgaacttggttgatcttgcaggaagtgaaaacattggccgttctggagctgttgataagagagctcgggaagctggaaatataaatcaatccctgttgactttgggaagggtcattactgcccttgtagaaagaacacctcatgttccttatcgagaatctaaactaactagaatcctccaggattctcttggagggcgtacaagaacatctataattgcaacaatttctcctgcatctctcaatcttgaggaaactctgagtacattggaatatgctcatagagcaaagaacatattgaataagcctgaagtgaatcagaaactcaccaaaaaagctcttattaaggagtatacggaggagatagaacgtttaaaacgagatcttgctgcagcccgtgagaaaaatggagtgtatatttctgaagaaaattttagagtcatgagtggaaaattaactgttcaagaagagcagattgtagaattgattgaaaaaattggtgctgttgaggaggagctgaatagggttacagagttgtttatggataataaaaatgaacttgaccagtgtaaatctgacctgcaaaataaaacacaagaacttgaaaccactcaaaaacatttgcaagaaactaaattacaacttgttaaagaagaatatatcacatcagctttggaaagtactgaggagaaacttcatgatgctgccagcaagctgcttaacacagttgaagaaactacaaaagatgtatctggtctccattccaaactggatcgtaagaaggcagttgaccaacacaatgcagaagctcaggatatttttggcaaaaacctgaatagtctgtttaataatatggaagaattaattaaggatggcagctcaaagcaaaaggccatgctagaagtacataagaccttatttggtaatctgctgtcttccagtgtctctgcattagataccattactacagtagcacttggatctctcacatctattccagaaaatgtgtctactcatgtttctcagatttttaatatgatactaaaagaacaatcattagcagcagaaagtaaaactgtactacaggaattgattaatgtactcaagactgatcttctaagttcactggaaatgattttatccccaactgtggtgtctatactgaaaatcaatagtcaactaaagcatattttcaagacttcattgacagtggccgataagatagaagatcaaaaaaaggaactagatggctttctcagtatactgtgtaacaatctacatgaactacaagaaaataccatttgttccttggttgagtcacaaaagcaatgtggaaacctaactgaagacctgaagacaataaagcagacccattcccaggaactttgcaagttaatgaatctttggacagagagattctgtgctttggaggaaaagtgtgaaaatatacagaaaccacttagtagtgtccaggaaaatatacagcagaaatctaaggatatagtcaacaaaatgacttttcacagtcaaaaattttgtgctgattctgatggcttctcacaggaactcagaaattttaaccaagaaggtacaaaattggttgaagaatctgtgaaacactctgataaactcaatggcaacctggaaaaaatatctcaagagactgaacagagatgtgaatctctgaacacaagaacagtttatttttctgaacagtgggtatcttccttaaatgaaagggaacaggaacttcacaacttattggaggttgtaagccaatgttgtgaggcttcaagttcagacatcactgagaaatcagatggacgtaaggcagctcatgagaaacagcataacatttttcttgatcagatgactattgatgaagataaattgatagcacaaaatctagaacttaatgaaaccataaaaattggtttgactaagcttaattgctttctggaacaggatctgaaactggatatcccaacaggtacgacaccacagaggaaaagttatttatacccatcaacactggtaagaactgaaccacgtgaacatctccttgatcagctgaaaaggaaacagcctgagctgttaatgatgctaaactgttcagaaaacaacaaagaagagacaattccggatgtggatgtagaagaggcagttctggggcagtatactgaagaacctctaagtcaagagccatctgtagatgctggtgtggattgttcatcaattggcggggttccatttttccagcataaaaaatcacatggaaaagacaaagaaaacagaggcattaacacactggagaggtctaaagtggaagaaactacagagcacttggttacaaagagcagattacctctgcgagcccagatcaacctttaattcacttgggggttggcaattttatttttaaagaaaacttaaaaataaaacctgaaaccccagaacttgagccttgtgtatagattttaaaagaatatatatatcagccgggcgcggtggctcatgcctgtaatcccagcactttgggaggctgaggcgggtggattgcttgagcccaggagtttgagaccagcctggccaacgtggcaaaacctcgtctctgttaaaaattagccgggcgtggtggcacactcctgtaatcccagctactggggaggctgaggcacgagaatcacttgaacccaggaagcggggttgcagtgagccaaaggtacaccactacactccagcctgggcaacagagcaagactcggtctcaaaaacaaaatttaaaaaagatataaggcagtactgtaaattcagttgaattttgatatctacccatttttctgtcatccctatagttcactttgtattaaattgggtttcatttgggatttgcaatgtaaatacgtatttctagttttcatataaagtagttcttttataacaaatgaaaagtatttttcttgtatattattaagtaatgaatatataagaactgtactcttctcagcttgagcttaacataggtaaatatcaccaacatctgtccttagaaaggaccatctcatgttttttttcttgctatgacttgtgtattttcttgcatcctccctagacttccctatttcgctttctcctcggctcactttctccctttttatttttcaccaaaccatttgtagagctacaaaacctatcctttcttattttcagtagtcagaattttatctagaaatcttttaacacctttttagtggttatttctaaaatcactgtcaacaataaatctaaccctagttgtatccctcctttaagtatttaaaacttgttgccccaaatgtgaaagcatttaattcctttaagaggcctaactcattcaccctgacagagttcacaaaaagcccactttagagtatacattgctattatgggagaccacccagacatctgactaatggctctgtgccacactccaagacctgtgccttttagagaagctcacaatgatttaaggactgtttgaaacttccaattatgtctataatttatattcttttgtttacatgatgaaactttttgttgttgcttgtttgtatataatacaatgtgtacatgtatctttttctcgattcaaatcttaacccttaggactctggtatttttgatctggcaaccatatttctggaagttgagatgtttcagcttgaagaaccaaaacagaaggaatatgtacaaagaataaattttctgctcacgatgagtttagtgtgtaaagtttagagacatctgactttgatagctaaattaaaccaaaccctattgaagaattgaatatatgctacttcaagaaactaaattgatctcgtagaattatcttaataaaataatggctataatttctctgcaaaatcagatgtcagcataagcgatggataatacctaataaactgccctcagtaaatccatggttaataaatgtggtttctacatt

SEQ ID NO: 415 - protein, 398 aa, Homo sapiens
MALLRRPTVSSDLENIDTGVNSKVKSHVTIRRTVLEEIGNRVTTRAAQVAKKAQNTKVPVQPTKTTNVNKQLKPTASVKPVQMEKLAPKGPSPTPEDVSMKEENLCQAFSDALLCKIEDIDNEDWENPQLCSDYVKDIYQYLRQLEVLQSINPHFLDGRDINGRMRAILVDWLVQVHSKFRLLQETLYMCVGIMDRFLQVQPVSRKKLQLVGITALLLASKYEEMFSPNIEDFVYITDNAYTSSQIREMETLILKELKFELGRPLPLHFLRRASKAGEVDVEQHTLAKYLMELTLIDYDMVHYHPSKVAAAASCLSQKVLGQGKWNLKQQYYTGYTENEVLEVMQHMAKNVVKVNENLTKFIAIKNKYASSKLLKISMIPQLNSKAVKDLASPLIGRS

SEQ ID NO: 416 - DNA, 1530 bp, Homo sapiens
aatcctggaacaaggctacagcgtcgaagatccccagcgctgcgggctcggagagcagtcctaacggcgcctcgtacgctagtgtcctcccttttcagtccgcgtccctccctgggccgggctggcactcttgccttccccgtccctcatggcgctgctccgacgcccgacggtgtccagtgatttggagaatattgacacaggagttaattctaaagttaagagtcatgtgactattaggcgaactgttttagaagaaattggaaatagagttacaaccagagcagcacaagtagctaagaaagctcagaacaccaaagttccagttcaacccaccaaaacaacaaatgtcaacaaacaactgaaacctactgcttctgtcaaaccagtacagatggaaaagttggctccaaagggtccttctcccacacctgaggatgtctccatgaaggaagagaatctctgccaagctttttctgatgccttgctctgcaaaatcgaggacattgataacgaagattgggagaaccctcagctctgcagtgactacgttaaggatatctatcagtatctcaggcagctggaggttttgcagtccataaacccacatttcttagatggaagagatataaatggacgcatgcgtgccatcctagtggattggctggtacaagtccactccaagtttaggcttctgcaggagactctgtacatgtgcgttggcattatggatcgatttttacaggttcagccagtttcccggaagaagcttcaattagttgggattactgctctgctcttggcttccaagtatgaggagatgttttctccaaatattgaagactttgtttacatcacagacaatgcttataccagttcccaaatccgagaaatggaaactctaattttgaaagaattgaaatttgagttgggtcgacccttgccactacacttcttaaggcgagcatcaaaagccggggaggttgatgttgaacagcacactttagccaagtatttgatggagctgactctcatcgactatgatatggtgcattatcatccttctaaggtagcagcagctgcttcctgcttgtctcagaaggttctaggacaaggaaaatggaacttaaagcagcagtattacacaggatacacagagaatgaagtattggaagtcatgcagcacatggccaagaatgtggtgaaagtaaatgaaaacttaactaaattcatcgccatcaagaataagtatgcaagcagcaaactcctgaagatcagcatgatccctcagctgaactcaaaagccgtcaaagaccttgcctccccactgataggaaggtcctaggctgccgtgggccctggggatgtgtgcttcattgtgccctttttcttattggtttagaactcttgattttgtacatagtcctctggtctatctcatgaaacctcttctcagaccagttttctaaacatatattgaggaaaaataaagcgattggtttttcttaaggtaaaaaaaaaaaaaaaaaa

SEQ ID NO: 417 - protein, 543 aa, Homo sapiens
MSRESDVEAQQSHGSSACSQPHGSVTQSQGSSSQSQGISSSSTSTMPNSSQSSHSSSGTLSSLETVSTQELYSIPEDQEPEDQEPEEPTPAPWARLWALQDGFANLECVNDNYWFGRDKSCEYCFDEPLLKRTDKYRTYSKKHFRIFREVGPKNSYIAYIEDHSGNGTFVNTELVGKGKRRPLNNNSEIALSLSRNKVFVFFDLTVDDQSVYPKALRDEYIMSKTLGSGACGEVKLAFERKTCKKVAIKIISKRKFAIGSAREADPALNVETEIEILKKLNHPCIIKIKNFFDAEDYYIVLELMEGGELFDKVVGNKRLKEATCKLYFYQMLLAVQYLHENGIIHRDLKPENVLLSSQEEDCLIKITDFGHSKILGETSLMRTLCGTPTYLAPEVLVSVGTAGYNRAVDCWSLGVILFICLSGYPPFSEHRTQVSLKDQITSGKYNFIPEVWAEVSEKALDLVKKLLVVDPKARFTTEEALRHPWLQDEDMKRKFQDLLSEENESTALPQVLAQPSTSRKRPREGEAEGAETTKRPAVCAAVL

SEQ ID NO: 418 - DNA, 2547 bp, Homo sapiens
cttacaaggtacagtcctctgctcaggggggccaggagggtcttataggcatcattcaccagggtcgaatgcttctctgagaagtccttttcagtctgagacctctggctgaagaaatctgggtggacaagacgctgcagttgctggtacctgtgctggagcttcgctgtatcaactctgaaggaacggttgcagtccataaggctgaagtagtctcgagtggggtcaggtgcctgcagcgctcggcactgtgggcagaagaacctgtcctcccgcccggggccccatgggccgccgcagttccaacagcggggataattgcttcccgcctgcgacgcagcatcgcagcttagcggtctccttctgggaacccctgtcggccaaaacccccacacccggagcaaagccccggctctcccccgccacatctggccggcggcctatctagccgtggtcactcgtggggaaaagcaaagagagcgtctaaccagactaatgttgctgattggctggggagtcgagggggcgggatcacccgaggggaacccgggttctaagttccgctctcccttctaaactacaactcccaggaggcattgaggcggcgcctgacggccacatctgctgctcctcattggtccggcggcaggggagggggttttgattggctgagggtggagtttgtatctgcaggtttagcgccactctgctggctgaggctgcggagagtgtgcggctccaggtgggctcacgcggtcgtgatgtctcgggagtcggatgttgaggctcagcagtctcatggcagcagtgcctgttcacagccccatggcagcgttacccagtcccaaggctcctcctcacagtcccagggcatatccagctcctctaccagcacgatgccaaactccagccagtcctctcactccagctctgggacactgagctccttagagacagtgtccactcaggaactctattctattcctgaggaccaagaacctgaggaccaagaacctgaggagcctacccctgccccctgggctcgattatgggcccttcaggatggatttgccaatcttgaatgtgtgaatgacaactactggtttgggagggacaaaagctgtgaatattgctttgatgaaccactgctgaaaagaacagataaataccgaacatacagcaagaaacactttcggattttcagggaagtgggtcctaaaaactcttacattgcatacatagaagatcacagtggcaatggaacctttgtaaatacagagcttgtagggaaaggaaaacgccgtcctttgaataacaattctgaaattgcactgtcactaagcagaaataaagtttttgtcttttttgatctgactgtagatgatcagtcagtttatcctaaggcattaagagatgaatacatcatgtcaaaaactcttggaagtggtgcctgtggagaggtaaagctggctttcgagaggaaaacatgtaagaaagtagccataaagatcatcagcaaaaggaagtttgctattggttcagcaagagaggcagacccagctctcaatgttgaaacagaaatagaaattttgaaaaagctaaatcatccttgcatcatcaagattaaaaacttttttgatgcagaagattattatattgttttggaattgatggaagggggagagctgtttgacaaagtggtggggaataaacgcctgaaagaagctacctgcaagctctatttttaccagatgctcttggctgtgcagtaccttcatgaaaacggtattatacaccgtgacttaaagccagagaatgttttactgtcatctcaagaagaggactgtcttataaagattactgattttgggcactccaagattttgggagagacctctctcatgagaaccttatgtggaacccccacctacttggcgcctgaagttcttgtttctgttgggactgctgggtataaccgtgctgtggactgctggagtttaggagttattctttttatctgccttagtgggtatccacctttctctgagcataggactcaagtgtcactgaaggatcagatcaccagtggaaaatacaacttcattcctgaagtctgggcagaagtctcagagaaagctctggaccttgtcaagaagttgttggtagtggatccaaaggcacgttttacgacagaagaagccttaagacacccgtggcttcaggatgaagacatgaagagaaagtttcaagatcttctgtctgaggaaaatgaatccacagctctaccccaggttctagcccagccttctactagtcgaaagcggccccgtgaaggggaagccgagggtgccgagaccacaaagcgcccagctgtgtgtgctgctgtgttgtgaactccgtggtttgaacacgaaagaaatgtaccttctttcactctgtcatctttcttttctttgagtctgtttttttatagtttgtattttaattatgggaataattgctttttcacagtcactgatgtacaattaaaaacctgatggaacctgg

SEQ ID NO: 419 - protein, 297 aa, Homo sapiens
MEDYTKIEKIGEGTYGVVYKGRHKTTGQVVAMKKIRLESEEEGVPSTAIREISLLKELRHPNIVSLQDVLMQDSRLYLIFEFLSMDLKKYLDSIPPGQYMDSSLVKSYLYQILQGIVFCHSRRVLHRDLKPQNLLIDDKGTIKLADFGLARAFGIPIRVYTHEVVTLWYRSPEVLLGSARYSTPVDIWSIGTIFAELATKKPLFHGDSEIDQLFRIFRALGTPNNEVWPEVESLQDYKNTFPKWKPGSLASHVKNLDENGLDLLSKMLIYDPAKRISGKMALNHPYFNDLDNQIKKM

SEQ ID NO: 420 - DNA, 1235 bp, Homo sapiens
ggggggggggggcacttggcttcaaagctggctcttggaaattgagcggagagcgacgcggttgttgtagctgccgctgcggccgccgcggaataataagccgggatctaccatacccattgactaactatggaagattataccaaaatagagaaaattggagaaggtacctatggagttgtgtataagggtagacacaaaactacaggtcaagtggtagccatgaaaaaaatcagactagaaagtgaagaggaaggggttcctagtactgcaattcgggaaatttctctattaaaggaacttcgtcatccaaatatagtcagtcttcaggatgtgcttatgcaggattccaggttatatctcatctttgagtttctttccatggatctgaagaaatacttggattctatccctcctggtcagtacatggattcttcacttgttaagagttatttataccaaatcctacaggggattgtgttttgtcactctagaagagttcttcacagagacttaaaacctcaaaatctcttgattgatgacaaaggaacaattaaactggctgattttggccttgccagagcttttggaatacctatcagagtatatacacatgaggtagtaacactctggtacagatctccagaagtattgctggggtcagctcgttactcaactccagttgacatttggagtataggcaccatatttgctgaactagcaactaagaaaccacttttccatggggattcagaaattgatcaactcttcaggattttcagagctttgggcactcccaataatgaagtgtggccagaagtggaatctttacaggactataagaatacatttcccaaatggaaaccaggaagcctagcatcccatgtcaaaaacttggatgaaaatggcttggatttgctctcgaaaatgttaatctatgatccagccaaacgaatttctggcaaaatggcactgaatcatccatattttaatgatttggacaatcagattaagaagatgtagctttctgacaaaaagtttccatatgttatgtcaacagatagttgtgtttttattgttaactcttgtctatttttgtcttatatatatttctttgttatcaaacttcagctgtacttcgtcttctaatttcaaaaatataacttaaaaatgtaaatattctatatgaatttaaatataattctgtaaatgtgaaaaaaaaaaaaaaaaaaaaa

SEQ ID NO: 421 - protein, 240 aa, Homo sapiens
MEDYTKIEKIGEGTYGVVYKGRHKTTGQVVAMKKIRLESEEEGVPSTAIREISLLKELRHPNIVSLQDVLMQDSRLYLIFEFLSMDLKKYLDSIPPGQYMDSSLVKVVTLWYRSPEVLLGSARYSTPVDIWSIGTIFAELATKKPLFHGDSEIDQLFRIFRALGTPNNEVWPEVESLQDYKNTFPKWKPGSLASHVKNLDENGLDLLSKMLIYDPAKRISGKMALNHPYFNDLDNQIKKM

SEQ ID NO: 422 - DNA, 948 bp, Homo sapiens
ccattgactaactatggaagattataccaaaatagagaaaattggagaaggtacctatggagttgtgtataagggtagacacaaaactacaggtcaagtggtagccatgaaaaaaatcagactagaaagtgaagaggaaggggttcctagtactgcaattcgggaaatttctctattaaaggaacttcgtcatccaaatatagtcagtcttcaggatgtgcttatgcaggattccaggttatatctcatctttgagtttctttccatggatctgaagaaatacttggattctatccctcctggtcagtacatggattcttcacttgttaaggtagtaacactctggtacagatctccagaagtattgctggggtcagctcgttactcaactccagttgacatttggagtataggcaccatatttgctgaactagcaactaagaaaccacttttccatggggattcagaaattgatcaactcttcaggattttcagagctttgggcactcccaataatgaagtgtggccagaagtggaatctttacaggactataagaatacatttcccaaatggaaaccaggaagcctagcatcccatgtcaaaaacttggatgaaaatggcttggatttgctctcgaaaatgttaatctatgatccagccaaacgaatttctggcaaaatggcactgaatcatccatattttaatgatttggacaatcagattaagaagatgtagctttctgacaaaaagtttccatatgttatgtcaacagatagttgtgtttttattgttaactcttgtctatttttgtcttatatatatttctttgttatcaaacttcagctgtacttcgtcttctaatttcaaaaatataacttaaaaatgtaaatattctatatgaatttaaatataattctgtaaatgtgaaaaaaaaaaaaaaaaaaaaa

SEQ ID NO: 423 - protein, 433 aa, Homo sapiens
MALRVTRNSKINAENKAKINMAGAKRVPTAPAATSKPGLRPRTALGDIGNKVSEQLQAKMPMKKEAKPSATGKVIDKKLPKPLEKVPMLVPVPVSEPVPEPEPEPEPEPVKEEKLSPEPILVDTASPSPMETSGCAPAEEDLCQAFSDVILAVNDVDAEDGADPNLCSEYVKDIYAYLRQLEEEQAVRPKYLLGREVTGNMRAILIDWLVQVQMKFRLLQETMYMTVSIIDRFMQNNCVPKKMLQLVGVTAMFIASKYEEMYPPEIGDFAFVTDNTYTKHQIRQMEMKILRALNFGLGRPLPLHFLRRASKIGEVDVEQHTLAKYLMELTMLDYDMVHFPPSQIAAGAFCLALKILDNGEWTPTLQHYLSYTEESLLPVMQHLAKNVVMVNQGLTKHMTVKNKYATSKHAKISTLPQLNSALVQDLAKAVAKV

SEQ ID NO: 424 - DNA, 2101 bp, Homo sapiens
acgaacaggccaataaggagggagcagtgcggggtttaaatctgaggctaggctggctcttctcggcgtgctgcggcggaacggctgttggtttctgctgggtgtaggtccttggctggtcgggcctccggtgttctgcttctccccgctgagctgctgcctggtgaagaggaagccatggcgctccgagtcaccaggaactcgaaaattaatgctgaaaataaggcgaagatcaacatggcaggcgcaaagcgcgttcctacggcccctgctgcaacctccaagcccggactgaggccaagaacagctcttggggacattggtaacaaagtcagtgaacaactgcaggccaaaatgcctatgaagaaggaagcaaaaccttcagctactggaaaagtcattgataaaaaactaccaaaacctcttgaaaaggtacctatgctggtgccagtgccagtgtctgagccagtgccagagccagaacctgagccagaacctgagcctgttaaagaagaaaaactttcgcctgagcctattttggttgatactgcctctccaagcccaatggaaacatctggatgtgcccctgcagaagaagacctgtgtcaggctttctctgatgtaattcttgcagtaaatgatgtggatgcagaagatggagctgatccaaacctttgtagtgaatatgtgaaagatatttatgcttatctgagacaacttgaggaagagcaagcagtcagaccaaaatacctactgggtcgggaagtcactggaaacatgagagccatcctaattgactggctagtacaggttcaaatgaaattcaggttgttgcaggagaccatgtacatgactgtctccattattgatcggttcatgcagaataattgtgtgcccaagaagatgctgcagctggttggtgtcactgccatgtttattgcaagcaaatatgaagaaatgtaccctccagaaattggtgactttgcttttgtgactgacaacacttatactaagcaccaaatcagacagatggaaatgaagattctaagagctttaaactttggtctgggtcggcctctacctttgcacttccttcggagagcatctaagattggagaggttgatgtcgagcaacatactttggccaaatacctgatggaactaactatgttggactatgacatggtgcactttcctccttctcaaattgcagcaggagctttttgcttagcactgaaaattctggataatggtgaatggacaccaactctacaacattacctgtcatatactgaagaatctcttcttccagttatgcagcacctggctaagaatgtagtcatggtaaatcaaggacttacaaagcacatgactgtcaagaacaagtatgccacatcgaagcatgctaagatcagcactctaccacagctgaattctgcactagttcaagatttagccaaggctgtggcaaaggtgtaacttgtaaacttgagttggagtactatatttacaaataaaattggcaccatgtgccatctgtacatattactgttgcatttacttttaataaagcttgtggccccttttacttttttatagcttaactaatttgaatgtggttacttcctactgtagggtagcggaaaagttgtcttaaaaggtatggtggggatatttttaaaaactccttttggtttacctggggatccaattgatgtatatgtttatatactgggttcttgttttatatacctggcttttactttattaatatgagttactgaaggtgatggaggtatttgaaaattttacttccataggacatactgcatgtaagccaagtcatggagaatctgctgcatagctctattttaaagtaaaagtctaccaccgaatccctagtccccctgttttctgtttcttcttgtgattgctgccataattctaagttatttacttttaccactatttaagttatcaactttagctagtatcttcaaactttcactttgaaaaatgagaattttatattctaagccagttttcattttggttttgtgttttggttaataaaacaatactcaaatacaaaaaaaaaaaa

SEQ ID NO: 425 - protein, 665 aa, Homo sapiens
MAAGGSTQQRRREMAAASAAAISGAGRCRLSKIGATRRPPPARVRVAVRLRPFVDGTAGASDPPCVRGMDSCSLEIANWRNHQETLKYQFDAFYGERSTQQDIYAGSVQPILRHLLEGQNASVLAYGPTGAGKTHTMLGSPEQPGVIPRALMDLLQLTREEGAEGRPWALSVTMSYLEIYQEKVLDLLDPASGDLVIREDCRGNILIPGLSQKPISSFADFERHFLPASRNRTVGATRLNQRSSRSHAVLLVKVDQRERLAPFRQREGKLYLIDLAGSEDNRRTGNKGLRLKESGAINTSLFVLGKVVDALNQGLPRVPYRDSKLTRLLQDSLGGSAHSILIANIAPERRFYLDTVSALNFAARSKEVINRPFTNESLQPHALGPVKLSQKELLGPPEAKRARGPEEEEIGSPEPMAAPASASQKLSPLQKLSSMDPAMLERLLSLDRLLASQGSQGAPLLSTPKRERMVLMKTVEEKDLEIERLKTKQKELEAKMLAQKAEEKENHCPTMLRPLSHRTVTGAKPLKKAVVMPLQLIQEQAASPNAEIHILKNKGRKRKLESLDALEPEEKAEDCWELQISPELLAHGRQKILDLLNEGSARDLRSLQRIGPKKAQLIVGWRELHGPFSQVEDLERVEGITGKQMESFLKANILGLAAGQRCGAS

SEQ ID NO: 426 - DNA, 2097 bp, Homo sapiens
gggcgggcccaaggagggagtggaatggccgcgggcggctcgacgcagcagaggcgacgcgagatggcggcagcttcagcggcggcgatctcaggagctggtcgctgtcggctaagcaagattggagctactcgtcgtccacctccagctcgcgtaagggtggctgtgcgactgcggccatttgtggatggaacagcgggagcaagtgatcccccctgtgtgcggggcatggacagctgctctctagagattgctaactggaggaaccaccaggagactctcaaataccagtttgatgccttctatggggagaggagtactcagcaggacatctatgcaggttcagtgcagcccatcctaaggcacttgctggaagggcagaatgccagtgtgcttgcctatggacccacaggagctgggaagacgcacacaatgctgggcagcccagagcaacctggggtgatcccgcgggctctcatggacctcctgcagctcacaagggaggagggtgccgagggccggccatgggccctttctgtcaccatgtcttacctagagatctaccaggagaaggtattagacctcctggaccctgcttcgggagacctggtaatccgagaagactgccgggggaatatcctgattccgggtctctcccagaagcccatcagtagctttgctgattttgagcggcacttcctgccagccagtcgaaatcggactgtaggagccacccggctcaaccagcgctcctcccgcagtcatgctgtgctcctggtcaaggtggaccagcgggaacgtttggccccatttcgccagcgagagggaaaactctacctgattgacttggctgggtcagaggacaaccggcgcacaggcaacaagggccttcggctaaaagagagtggagccatcaacacctccctgtttgtcctgggcaaagtggtagatgcgctgaatcagggcctccctcgtgtaccttatcgggacagcaagctcactcgcctattgcaggactctctgggtggctcagcccacagtatccttattgccaacattgcccctgagagacgcttctacctagacacagtctccgcactcaactttgctgccaggtccaaggaggtgatcaatcggccttttaccaatgagagcctgcagcctcatgccttgggacctgttaagctgtctcagaaagaattgcttggtccaccagaggcaaagagagcccgaggccctgaggaagaggagattgggagccctgagcccatggcagctccagcctctgcctcccagaaactcagccccctacagaagctaagcagcatggacccggccatgctggagcgcctcctcagcttggaccgtctgcttgcctcccaggggagccagggggcccctctgttgagtaccccaaagcgagagcggatggtgctaatgaagacagtagaagagaaggacctagagattgagaggcttaagacgaagcaaaaagaactggaggccaagatgttggcccagaaggctgaggaaaaggagaaccattgtcccacaatgctccggcccctttcacatcgcacagtcacaggggcaaagcccctgaaaaaggctgtggtgatgcccctacagctaattcaggagcaggcagcatccccaaatgccgagatccacatcctgaagaataaaggccggaagagaaagctggagtccctggatgccctagagcctgaggagaaggctgaggactgctgggagctacagatcagcccggagctactggctcatgggcgccaaaaaatactggatctgctgaacgaaggctcagcccgagatctccgcagtcttcagcgcattggcccgaagaaggcccagctaatcgtgggctggcgggagctccacggccccttcagccaggtggaggacctggaacgcgtggagggcataacggggaaacagatggagtccttcctgaaggcaaacatcctgggtctcgccgccggccagcgctgtggcgcctcctgaccgtcgtctcctcactccgccttttcaaatttttgtataaccccgtgttgtgtaaatacagtttttgctccggtg

SEQ ID NO: 427 - protein, 209 aa, Homo sapiens
MNPSMKQKQEEIKENIKNSSVPRRTLKMIQPSASGSLVGRENELSAGLSKRKHRNDHLTSTTSSPGVIVPESSENKNLGGVTQESFDLMIKENPSSQYWKEVAEKRRKALYEALKENEKLHKEIEQKDNEIARLKKENKELAEVAEHVQYMAELIERLNGEPLDNFESLDNQEFDSEEETVEDSLVEDSEIGTCAEGTVSSSTDAKPCI

SEQ ID NO: 428 - DNA, 1224 bp, Homo sapiens
gttcggagcgggcgagcggagttagcagggctttactgcagagcgcgccgggcactccagcgaccgtggggatcagcgtaggtgagctgtggccttttgcgaggtgctgcagccatagctacgtgcgttcgctacgaggattgagcgtctccacccagtaagtgggcaagaggcggcaggaagtgggtacgcaggggcgcaaggcgcacagcctctagacgactcgctttccctccggccaacctctgaagccgcgtcctactttgacagctgcagggccgcggcctggtcttctgtgcttcaccatctacataatgaatcccagtatgaagcagaaacaagaagaaatcaaagagaatataaagaatagttctgtcccaagaagaactctgaagatgattcagccttctgcatctggatctcttgttggaagagaaaatgagctgtccgcaggcttgtccaaaaggaaacatcggaatgaccacttaacatctacaacttccagccctggggttattgtcccagaatctagtgaaaataaaaatcttggaggagtcacccaggagtcatttgatcttatgattaaagaaaatccatcctctcagtattggaaggaagtggcagaaaaacggagaaaggcgctgtatgaagcacttaaggaaaatgagaaacttcataaagaaattgaacaaaaggacaatgaaattgcccgcctgaaaaaggagaataaagaactggcagaagtagcagaacatgtacagtatatggcagagctaatagagagactgaatggtgaacctctggataattttgaatcactggataatcaggaatttgattctgaagaagaaactgttgaggattctctagtggaagactcagaaattggcacgtgtgctgaaggaactgtatcttcctctacggatgcaaagccatgtatatgaaatgcattaatatttgactgttgagaattttactgccgaagtttacctccactagttctttgtagcagagtacataactacataatgccaactctggaatcaaatttccttgtttgaatcctgggaccctattgcattaaagtacaaatactatgtatttttaatctatgatggtttatgtgaataggattttctcagttgtcagccatgacttatgtttattactaaataaacttcaaactcctgtggaaaaaaaaaaaaaaaaaaaaaaaaaaaaaaa

SEQ ID NO: 429 - protein, 79 aa, Homo sapiens
MAHKQIYYSDKYFDEHYEYRHVMLPRELSKQVPKTHLMSEEEWRRLGVQQSLGWVHYMIHEPEPHILLFRRPLPKDQQK

SEQ ID NO: 430 - DNA, 627 bp, Homo sapiens
agtctccggcgagttgttgcctgggctggacgtggttttgtctgctgcgcccgctcttcgcgctctcgtttcattttctgcagcgcgccacgaggatggcccacaagcagatctactactcggacaagtacttcgacgaacactacgagtaccggcatgttatgttacccagagaactttccaaacaagtacctaaaactcatctgatgtctgaagaggagtggaggagacttggtgtccaacagagtctaggctgggttcattacatgattcatgagccagaaccacatattcttctctttagacgacctcttccaaaagatcaacaaaaatgaagtttatctggggatcgtcaaatctttttcaaatttaatgtatatgtgtatataaggtagtattcagtgaatacttgagaaatgtacaaatctttcatccatacctgtgcatgagctgtattcttcacagcaacagagctcagttaaatgcaactgcaagtaggttactgtaagatgtttaagataaaagttcttccagtcagtttttctcttaagtgcctgtttgagtttactgaaacagtttacttttgttcaataaagtttgtatgttgcatttaaaaaaaaaaaaaaa

SEQ ID NO: 431 - protein, 620 aa, Homo sapiens
MRRSEVLAEESIVCLQKALNHLREIWELIGIPEDQRLQRTEVVKKHIKELLDMMIAEEESLKERLIKSISVCQKELNTLCSELHVEPFQEEGETTILQLEKDLRTQVELMRKQKKERKQELKLLQEQDQELCEILCMPHYDIDSASVPSLEELNQFRQHVTTLRETKASRREEFVSIKRQIILCMEELDHTPDTSFERDVVCEDEDAFCLSLENIATLQKLLRQLEMQKSQNEAVCEGLRTQIRELWDRLQIPEEEREAVATIMSGSKAKVRKALQLEVDRLEELKMQNMKKVIEAIRVELVQYWDQCFYSQEQRQAFAPFCAEDYTESLLQLHDAEIVRLKNYYEVHKELFEGVQKWEETWRLFLEFERKASDPNRFTNRGGNLLKEEKQRAKLQKMLPKLEEELKARIELWEQEHSKAFMVNGQKFMEYVAEQWEMHRLEKERAKQERQLKNKKQTETEMLYGSAPRTPSKRRGLAPNTPGKARKLNTTTMSNATANSSIRPIFGGTVYHSPVSRLPPSGSKPVAASTCSGKKTPRTGRHGANKENLELNGSILSGGYPGSAPLQRNFSINSVASTYSEFAKDPSLSDSSTVGLQRELSKASKSDATSGILNSTNIQS

SEQ ID NO: 432 - DNA, 3044 bp, Homo sapiens
gtttgcgggtggttgttgctctcggggccgtgtggagtaggtctggacctggactcacggctgcttggagcgtccgccatgaggagaagtgaggtgctggcggaggagtccatagtatgtctgcagaaagccctaaatcaccttcgggaaatatgggagctaattgggattccagaggaccagcggttacaaagaactgaggtggtaaagaagcatatcaaggaactcctggatatgatgattgctgaagaggaaagcctgaaggaaagactcatcaaaagcatatccgtctgtcagaaagagctgaacactctgtgcagcgagttacatgttgagccatttcaggaagaaggagagacgaccatcttgcaactagaaaaagatttgcgcacccaagtggaattgatgcgaaaacagaaaaaggagagaaaacaggaactgaagctacttcaagagcaagatcaagaactgtgcgaaattctttgtatgccccactatgatattgacagtgcctcagtgcccagcttagaagagctgaaccagttcaggcaacatgtgacaactttgagggaaacaaaggcttctaggcgtgaggagtttgtcagtataaagagacagatcatactgtgtatggaagaattagaccacaccccagacacaagctttgaaagagatgtggtgtgtgaagacgaagatgccttttgtttgtctttggagaatattgcaacactacaaaagttgctacggcagctggaaatgcagaaatcacaaaatgaagcagtgtgtgaggggctgcgtactcaaatccgagagctctgggacaggttgcaaatacctgaagaagaaagagaagctgtggccaccattatgtctgggtcaaaggccaaggtccggaaagcgctgcaattagaagtggatcggttggaagaactgaaaatgcaaaacatgaagaaagtgattgaggcaattcgagtggagctggttcagtactgggaccagtgcttttatagccaggagcagagacaagcttttgcccctttctgtgctgaggactacacagaaagtctgctccagctccacgatgctgagattgtgcggttaaaaaactactatgaagttcacaaggaactctttgaaggtgtccagaagtgggaagaaacctggaggcttttcttagagtttgagagaaaagcttcagatccaaatcgatttacaaaccgaggaggaaatcttctaaaagaagaaaaacaacgagccaagctccagaaaatgctgcccaagctggaagaagagttgaaggcacgaattgaattgtgggaacaggaacattcaaaggcatttatggtgaatgggcagaaattcatggagtatgtggcagaacaatgggagatgcatcgattggagaaagagagagccaagcaggaaagacaactgaagaacaaaaaacagacagagacagagatgctgtatggcagcgctcctcgaacacctagcaagcggcgaggactggctcccaatacaccgggcaaagcacgtaagctgaacactaccaccatgtccaatgctacggccaatagtagcattcggcctatctttggagggacagtctaccactcccccgtgtctcgacttcctccttctggcagcaagccagtcgctgcttccacctgttcagggaagaaaacaccccgtactggcaggcatggagccaacaaggagaacctggagctcaacggcagcatcctgagtggtgggtaccctggctcggcccccctccagcgcaacttcagcattaattctgttgccagcacctattctgagtttgcgaaggatccgtccctctctgacagttccactgttgggcttcagcgagaactttcaaaggcttccaaatctgatgctacttctggaatcctcaattcaaccaacatccagtcctgagaagccctgatcagtcaaccagctgtggcttcctgtgcctagactggacctaattatatgggggtgactttagtttttcttcagcttaggagtgcttgaaaccttggccaggttccatgaccatgggcctaacttaaagatgtgaatgagtgttacagttgaaagcccatcataggtttagtggtcctaggagacttggttttgacttatatacatgaaaagtttatggcaagaagtgcaaattttagcatatggggcctgacttctctaccacataattctacttgctgaagcatgatcaaagcttgttttatttcaccactgtaggaaaatgattgactatgcccatccctgggggtaattttggcatgtatacctgtaactagtaattaacatcttttttgtttaggcatgttcaattaatgctgtagctatcatagctttgctcttacctgaagccttgtccccaccacacaggacagccttcctcctgaagagaatgtctttgtgtgtccgaagttgagatggcctgccctactggcaaagaggtgacaggaaggctgggagcagctttgttaaattgtgttcagttctgttacacagtgcattgccctttgttgggggtatgcatgtatgaacacacatgcttgtcggaacgctttctcggcgtttgtcccttggctctcatctcccccattcctgtgcctactttgcctgagttcttctacccccgcagttgccagccagattgggagtctgtttgttccaatgggttgagctgtctttgtcgtggagatctggaactttgcacatgtcactactggggaggtgttcctgctctagcttccacgatgaggcgccctctttacctatcctctcaatcactactcttcttgaagcactattatttattcttccgctgtctgcctgcagcagtactactgtcaacatagtgtaaatggttctcaaaagcttaccagtgtggacttggtgttagccacgctgtttacctcatacagtacgtgtcctgtttttaaaatatacaattattcttaaaaataaattaaaatcgtatacttacatttcaaaaaaaaaaaaaaaaa

SEQ ID NO: 433 - protein, 313 aa, Homo sapiens
MPVAGSELPRRPLPPAAQERDAEPRPPHGELQYLGQIQHILRCGVRKDDRTGTGTLSVFGMQARYSLRDEFPLLTTKRVFWKGVLEELLWFIKGSTNAKELSSKGVKIWDANGSRDFLDSLGFSTREEGDLGPVYGFQWRHFGAEYRDMESDYSGQGVDQLQRVIDTIKTNPDDRRIIMCAWNPRDLPLMALPPCHALCQFYVVNSELSCQLYQRSGDMGLGVPFNIASYALLTYMIAHITGLKPGDFIHTLGDAHIYLNHIEPLKIQLQREPRPFPKLRILRKVEKIDDFKAEDFQIEGYNPHPTIKMEMAV

SEQ ID NO: 434 - DNA, 1536 bp, Homo sapiens
ggggggggggggaccacttggcctgcctccgtcccgccgcgccacttggcctgcctccgtcccgccgcgccacttcgcctgcctccgtcccccgcccgccgcgccatgcctgtggccggctcggagctgccgcgccggcccttgccccccgccgcacaggagcgggacgccgagccgcgtccgccgcacggggagctgcagtacctggggcagatccaacacatcctccgctgcggcgtcaggaaggacgaccgcacgggcaccggcaccctgtcggtattcggcatgcaggcgcgctacagcctgagagatgaattccctctgctgacaaccaaacgtgtgttctggaagggtgttttggaggagttgctgtggtttatcaagggatccacaaatgctaaagagctgtcttccaagggagtgaaaatctgggatgccaatggatcccgagactttttggacagcctgggattctccaccagagaagaaggggacttgggcccagtttatggcttccagtggaggcattttggggcagaatacagagatatggaatcagattattcaggacagggagttgaccaactgcaaagagtgattgacaccatcaaaaccaaccctgacgacagaagaatcatcatgtgcgcttggaatccaagagatcttcctctgatggcgctgcctccatgccatgccctctgccagttctatgtggtgaacagtgagctgtcctgccagctgtaccagagatcgggagacatgggcctcggtgtgcctttcaacatcgccagctacgccctgctcacgtacatgattgcgcacatcacgggcctgaagccaggtgactttatacacactttgggagatgcacatatttacctgaatcacatcgagccactgaaaattcagcttcagcgagaacccagacctttcccaaagctcaggattcttcgaaaagttgagaaaattgatgacttcaaagctgaagactttcagattgaagggtacaatccgcatccaactattaaaatggaaatggctgtttagggtgctttcaaaggagcttgaaggatattgtcagtctttaggggttgggctggatgccgaggtaaaagttctttttgctctaaaagaaaaaggaactaggtcaaaaatctgtccgtgacctatcagttattaatttttaaggatgttgccactggcaaatgtaactgtgccagttctttccataataaaaggctttgagttaactcactgagggtatctgacaatgctgaggttatgaacaaagtgaggagaatgaaatgtatgtgctcttagcaaaaacatgtatgtgcatttcaatcccacgtacttataaagaaggttggtgaatttcacaagctatttttggaatatttttagaatattttaagaatttcacaagctattccctcaaatctgagggagctgagtaacaccatcgatcatgatgtagagtgtggttatgaactttatagttgttttatatgttgctataataaagaagtgttctgc

SEQ ID NO: 435 - protein, 225 aa, Homo sapiens
MNSNVENLPPHIIRLVYKEVTTLTADPPDGIKVFPNEEDLTDLQVTIEGPEGTPYAGGLFRMKLLLGKDFPASPPKGYFLTKIFHPNVGANGEICVNVLKRDWTAELGIRHVLLTIKCLLIHPNPESALNEEAGRLLLENYEEYAARARLLTEIHGGAGGPSGRAEAGRALASGTEASSTDPGAPGGPGGAEGPMAKKHAGERDKKLAAKKKTDKKRALRALRRL

SEQ ID NO: 436 - DNA, 890 bp, Homo sapiens
ggcggaccgaagaacgcaggaagggggccggggggacccgcccccggccggccgcagccatgaactccaacgtggagaacctacccccgcacatcatccgcctggtgtacaaggaggtgacgacactgaccgcagacccacccgatggcatcaaggtctttcccaacgaggaggacctcaccgacctccaggtcaccatcgagggccctgaggggaccccatatgctggaggtctgttccgcatgaaactcctgctggggaaggacttccctgcctccccacccaagggctacttcctgaccaagatcttccacccgaacgtgggcgccaatggcgagatctgcgtcaacgtgctcaagagggactggacggctgagctgggcatccgacacgtactgctgaccatcaagtgcctgctgatccaccctaaccccgagtctgcactcaacgaggaggcgggccgcctgctcttggagaactacgaggagtatgcggctcgggcccgtctgctcacagagatccacgggggcgccggcgggcccagcggcagggccgaagccggtcgggccctggccagtggcactgaagcttcctccaccgaccctggggccccagggggcccgggaggggctgagggtcccatggccaagaagcatgctggcgagcgcgataagaagctggcggccaagaaaaagacggacaagaagcgggcgctgcgggcgctgcggcggctgtagtgggctctcttcctccttccaccgtgaccccaacctctcctgtcccctccctccaactctgtctctaagttatttaaattatggctggggtcggggagggtacagggggcactgggacctggatttgtttttctaaataaagttggaaaagca

SEQ ID NO: 437 - protein, 197 aa, Homo sapiens
MQRASRLKRELHMLATEPPPGITCWQDKDQMDDLRAQILGGANTPYEKGVFKLEVIIPERYPFEPPQIRFLTPIYHPNIDSAGRICLDVLKLPPKGAWRPSLNIATVLTSIQLLMSEPNPDDPLMADISSEFKYNKPAFLKNARQWTEKHARQKQKADEEEMLDNLPEAGDSRVHNSTQKRKASQLVGIEKKFHPDV

SEQ ID NO: 438 - DNA, 928 bp, Homo sapiens
gcgcgcagcgctggtaccccgttggtccgcgcgttgctgcgttgtgaggggtgtcagctcagtgcatcccaggcagctcttagtgtggagcagtgaactgtgtgtggttccttctacttggggatcatgcagagagcttcacgtctgaagagagagctgcacatgttagccacagagccacccccaggcatcacatgttggcaagataaagaccaaatggatgacctgcgagctcaaatattaggtggagccaacacaccttatgagaaaggtgtttttaagctagaagttatcattcctgagaggtacccatttgaacctcctcagatccgatttctcactccaatttatcatccaaacattgattctgctggaaggatttgtctggatgttctcaaattgccaccaaaaggtgcttggagaccatccctcaacatcgcaactgtgttgacctctattcagctgctcatgtcagaacccaaccctgatgacccgctcatggctgacatatcctcagaatttaaatataataagccagccttcctcaagaatgccagacagtggacagagaagcatgcaagacagaaacaaaaggctgatgaggaagagatgcttgataatctaccagaggctggtgactccagagtacacaactcaacacagaaaaggaaggccagtcagctagtaggcatagaaaagaaatttcatcctgatgtttaggggacttgtcctggttcatcttagttaatgtgttctttgccaaggtgatctaagttgcctaccttgaatttttttttaaatatatttgatgacataatttttgtgtagtttatttatcttgtacatatgtattttgaaatcttttaaacctgaaaaataaatagtcatttaatgttgaaaaaaaaaaaaaaaaaaaaaaaaaaaaaaa

SEQ ID NO: 439 - protein, 91 aa, Homo sapiens
MAANATTNPSQLLPLELVDKCIGSRIHIVMKSDKEIVGTLLGFDDFVNMVLEDVTEFEITPEGRRITKLDQILLNGNNITMLVPGGEGPEV

SEQ ID NO: 440 - DNA, 749 bp, Homo sapiens
atggcggctaacgctactaccaacccgtcgcagctgctgccgttagagcttgtggacaaatgtataggatcaagaattcacatcgtgatgaagagtgataaggaaattgttggtactcttctaggatttgatgactttgtcaatatggtactggaagatgtcactgagtttgaaatcacaccagaaggaagaaggattactaaattagatcagattttgctaaatggaaataatataacaatgctggttcctggaggagaaggacctgaagtgtgaatgagtttccttgacttacactagattttgttttggcttataatgacaagaaaatggaattttttttcccactttctaatgtttaaatcccataaagctaagtttcccgttaaagggaagtgctttgaagatgtgtacccatttttgtaagttaatcatgattatcctggaaaaagaagaaaagaacttcttcttttgcagatgaaaataaaggtgtttttggttaactgtcattttgtttattctactgcagtagccagtggaacaaagtttgtagttattttgccacttacttttctgtcattatatgcttatttgttttgtcatttacgtgaccatttgattctcaaacaaaagttgttccaaacaaaatgatgaactttgatttgaacaggtgcatttaaacaaccggaaatgatcacttagaaaattcaattaaaatgctgttgttttgtaaaaaaaaaaaaaaaaaa

SEQ ID NO: 441 - protein, 642 aa, Homo sapiens
MKRSSVSSGGAGRLSMQELRSQDVNKQGLYTPQTKEKPTFGKLSINKPTSERKVSLFGKRTSGHGSRNSQLGIFSSSEKIKDPRPLNDKAFIQQCIRQLCEFLTENGYAHNVSMKSLQAPSVKDFLKIFTFLYGFLCPSYELPDTKFEEEVPRIFKDLGYPFALSKSSMYTVGAPHTWPHIVAALVWLIDCIKIHTAMKESSPLFDDGQPWGEETEDGIMHNKLFLDYTIKCYESFMSGADSFDEMNAELQSKLKDLFNVDAFKLESLEAKNRALNEQIARLEQEREKEPNRLESLRKLKASLQGDVQKYQAYMSNLESHSAILDQKLNGLNEEIARVELECETIKQENTRLQNIIDNQKYSVADIERINHERNELQQTINKLTKDLEAEQQKLWNEELKYARGKEAIETQLAEYHKLARKLKLIPKGAENSKGYDFEIKFNPEAGANCLVKYRAQVYVPLKELLNETEEEINKALNKKMGLEDTLEQLNAMITESKRSVRTLKEEVQKLDDLYQQKIKEAEEEDEKCASELESLEKHKHLLESTVNQGLSEAMNELDAVQREYQLVVQTTTEERRKVGNNLQRLLEMVATHVGSVEKHLEEQIAKVDREYEECMSEDLSENIKEIRDKYEKKATLIKSSEE

SEQ ID NO: 442 - DNA, 2150 bp, Homo sapiens
ctcgagccacgaaggccccgctgtcctgtctagcagatacttgcacggtttacagaaattcggtccctgggtcgtgtcaggaaactggaaaaaaggtcataagcatgaagcgcagttcagtttccagcggtggtgctggccgcctctccatgcaggagttaagatcccaggatgtaaataaacaaggcctctatacccctcaaaccaaagagaaaccaacctttggaaagttgagtataaacaaaccgacatctgaaagaaaagtctcgctatttggcaaaagaactagtggacatggatcccggaatagtcaacttggtatattttccagttctgagaaaatcaaggacccgagaccacttaatgacaaagcattcattcagcagtgtattcgacaactctgtgagtttcttacagaaaatggttatgcacataatgtgtccatgaaatctctacaagctccctctgttaaagacttcctgaagatcttcacatttctttatggcttcctgtgcccctcatacgaacttcctgacacaaagtttgaagaagaggttccaagaatctttaaagaccttgggtatccttttgcactatccaaaagctccatgtacacagtgggggctcctcatacatggcctcacattgtggcagccttagtttggctaatagactgcatcaagatacatactgccatgaaagaaagctcacctttatttgatgatgggcagccttggggagaagaaactgaagatggaattatgcataataagttgtttttggactacaccataaaatgctatgagagttttatgagtggtgccgacagctttgatgagatgaatgcagagctgcagtcaaaactgaaggatttatttaatgtggatgcttttaagctggaatcattagaagcaaaaaacagagcattgaatgaacagattgcaagattggaacaagaaagagaaaaagaaccgaatcgtctagagtcgttgagaaaactgaaggcttccttacaaggagatgttcaaaagtatcaggcatacatgagcaatttggagtctcattcagccattcttgaccagaaattaaatggtctcaatgaggaaattgctagagtagaactagaatgtgaaacaataaaacaggagaacactcgactacagaatatcattgacaaccagaagtactcagttgcagacattgagcgaataaatcatgaaagaaatgaattgcagcagactattaataaattaaccaaggacctggaagctgaacaacagaagttgtggaatgaggagttaaaatatgccagaggcaaagaagcgattgaaacacaattagcagagtatcacaaattggctagaaaattaaaacttattcctaaaggtgctgagaattccaaaggttatgactttgaaattaagtttaatcccgaggctggtgccaactgccttgtcaaatacagggctcaagtttatgtacctcttaaggaactcctgaatgaaactgaagaagaaattaataaagccctaaataaaaaaatgggtttggaggatactttagaacaattgaatgcaatgataacagaaagcaagagaagtgtgagaactctgaaagaagaagttcaaaagctggatgatctttaccaacaaaaaattaaggaagcagaggaagaggatgaaaaatgtgccagtgagcttgagtccttggagaaacacaagcacctgctagaaagtactgttaaccaggggctcagtgaagctatgaatgaattagatgctgttcagcgggaataccaactagttgtgcaaaccacgactgaagaaagacgaaaagtgggaaataacttgcaacgtctgttagagatggttgctacacatgttgggtctgtagagaaacatcttgaggagcagattgctaaagttgatagagaatatgaagaatgcatgtcagaagatctctcggaaaatattaaagagattagagataagtatgagaagaaagctactctaattaagtcttctgaagaatgaagataaaatgttgatcatgtatatatatccatagtgaataaaattgtctcagtaaaaaaaaaaaaaaaaaaaaaaaaaaaaaaaaaaaaaaaaaaaaaaaaaaaaaaaaaaaaaaaa

SEQ ID NO: 443 - protein, 380 aa, Homo sapiens
MGIQGLAKLIADVAPSAIRENDIKSYFGRKVAIDASMSIYQFLIAVRQGGDVLQNEEGETTSHLMGMFYRTIRMMENGIKPVYVFDGKPPQLKSGELAKRSERRAEAEKQLQQAQAAGAEQEVEKFTKRLVKVTKQHNDECKHLLSLMGIPYLDAPSEAEASCAALVKAGKVYAAATEDMDCLTFGSPVLMRHLTASEAKKLPIQEFHLSRILQELGLNQEQFVDLCILLGSDYCESIRGIGPKRAVDLIQKHKSIEEIVRRLDPNKYPVPENWLHKEAHQLFLEPEVLDPESVELKWSEPNEEELIKFMCGEKQFSEERIRSGVKRLSKSRQGSTQGRLDDFFKVTGSLSSAKRKEPEPKGSTKKKAKTGAAGKFKRGK

SEQ ID NO: 444 - DNA, 2265 bp, Homo sapiens
agtcctgcgatttcgggtgtagagggagcaggggcctgcggggacctggtgtgggtggagtggggacaagcggtggagaagggtacgccagggtcgctgagagactctgttctccctggagggactggttgccatgagagcagccgtctgaggggacgcagcctgcactacgcgccccaagaggctgtgcgtggcgagcaggtcacgtgacgggagcgcgggctttggaaggcggctgaacgtcaggccacccgccgctaagctgagaagggagagcgagcttaggaccgcctgcccggggcaaccccgaaccaagctttagccgccgaggccgcgtgtcccaaaggccagtcatccctcctctgtgttgccatgggaattcaaggcctggccaaactaattgctgatgtggcccccagtgccatccgggagaatgacatcaagagctactttggccgtaaggtggccattgatgcctctatgagcatttatcagttcctgattgctgttcgccagggtggggatgtgctgcagaatgaggagggtgagaccaccagccacctgatgggcatgttctaccgcaccattcgcatgatggagaacggcatcaagcccgtgtatgtctttgatggcaagccgccacagctcaagtcaggcgagctggccaaacgcagtgagcggcgggctgaggcagagaagcagctgcagcaggctcaggctgctggggccgagcaggaggtggaaaaattcactaagcggctggtgaaggtcactaagcagcacaatgatgagtgcaaacatctgctgagcctcatgggcatcccttatcttgatgcacccagtgaggcagaggccagctgtgctgccctggtgaaggctggcaaagtctatgctgcggctaccgaggacatggactgcctcaccttcggcagccctgtgctaatgcgacacctgactgccagtgaagccaaaaagctgccaatccaggaattccacctgagccggattctgcaggagctgggcctgaaccaggaacagtttgtggatctgtgcatcctgctaggcagtgactactgtgagagtatccggggtattgggcccaagcgggctgtggacctcatccagaagcacaagagcatcgaggagatcgtgcggcgacttgaccccaacaagtaccctgtgccagaaaattggctccacaaggaggctcaccagctcttcttggaacctgaggtgctggacccagagtctgtggagctgaagtggagcgagccaaatgaagaagagctgatcaagttcatgtgtggtgaaaagcagttctctgaggagcgaatccgcagtggggtcaagaggctgagtaagagccgccaaggcagcacccagggccgcctggatgatttcttcaaggtgaccggctcactctcttcagctaagcgcaaggagccagaacccaagggatccactaagaagaaggcaaagactggggcagcagggaagtttaaaaggggaaaataaatgtgtttccccattatacctccttcaccccagaatatttgccgtcttgtacccttaagagctacagctagagaaaccttcacggggtggagagaggattctaaggcttttctagcgtgacccttttcagtagtgctagtcccttttttacttgatcttaatggcaagaaggccacagaggtacttttccttttttagctcaggaaaatatgtcaggctcaaaccacttctcaggcagtttaatggacactaagtccattgttacatgaaagtgatagatagcaacaagttttggagaagagagagggagataaaagggggagacaaaagatgtacagaaatgatttcctggctggccaactggtggccagtgggaggtgatggtggacctagactgtgcttttctgtcttgttcagccttgacccaccttgagagagagccaccaggaaggcgcatcttagcagatgggaggaactgctgagagaagatgggcagaaagctggagcccctggagttggctgtgtctgtgtttgtgactgattactggctgtgtcttgggtgggcagaaactcgaacttgctatgtaatttgtgtctagttattcagaggagtaagatggtgatgttcacctggcaatcagctgagttgagactttggaataagacactggttttcatgcgctgtttttgttttaaagttatgaagaaaaaagtcaataaaattctaaaagtaaaaaaaaaaaaaaaaaa

SEQ ID NO: 445 - protein, 277 aa, Homo sapiens
MEAAETEAEAAALEVLAEVAGILEPVGLQEEAELPAKILVEFVVDSQKKDKLLCSQLQVADFLQNILAQEDTAKGLDPLASEDTSRQKAIAAKEQWKELKATYREHVEAIKIGLTKALTQMEEAQRKRTQLREAFEQLQAKKQMAMEKRRAVQNQWQLQQEKHLQHLAEVSAEVRERKTGTQQELDRVFQKLGNLKQQAEQERDKLQRYQTFLQLLYTLQGKLLFPEAEAEAENLPDDKPQQPTRPQEQSTGDTMGRDPGVSFKAVGLQPAGDVNLP

SEQ ID NO: 446 - DNA, 1658 bp, Homo sapiens
ggcacgagctcggctcctggaaagatggaggcagcggagacagaggcggaagctgcagccctagaggtcctggctgaggtggcaggcatcttggaacctgtaggcctgcaggaggaggcagaactgccagccaagatcctggttgagtttgtggtggactctcagaagaaagacaagctgctctgcagccagcttcaggtagcggatttcctgcagaacatcctggctcaggaggacactgctaagggtctcgaccccttggcttctgaagacacgagccgacagaaggcaattgcagctaaggaacaatggaaagagctgaaggccacctacagggagcacgtagaggccatcaaaattggcctcaccaaggccctgactcagatggaggaagcccagaggaaacggacacaactccgggaagcctttgagcagctccaggccaagaaacaaatggccatggagaaacgcagagcagtccagaaccagtggcagctacaacaggagaagcatctgcagcatctggcggaggtttctgcagaggtgagggagcgtaagacagggactcagcaggagcttgacagggtgtttcagaaacttggaaacctgaagcagcaggcagaacaggagcgggacaagctgcagaggtatcagaccttcctccagcttctgtataccctgcagggtaagctgttgttccctgaggctgaggctgaggcagagaatcttccagatgataaaccccagcagccgactcgaccccaggagcagagtacaggagacaccatggggagagaccctggtgtgtccttcaaggctgttggtctacaacctgctggagatgtaaatttgccatgacttcctggaggacagcagcatggagaaagatcctagaaaaggcctctgacttccctcacctcccaaccatcattacaggaaagactgtgaactcctgagttcagcttgatttctgactacatcccagcaagctctggcatctgtggattaaaatccctggatctctctcagttgtgtatttgttcatcttcatatgctggcaggaacaactattaatacagatactcagaagccaataacatgacaggagctgggactggtttgaacacagggtgtgcagatggggagggggtactggccttgggcctcctatgatgcagacatggtgaatttaattcaaggaggaggagaatgttttaggcaggtggttatatgtgggaagataattttattcatggatccaaatgtttgttgagtcctttctttgtgctaaggttcttgcggtgaaccagaattataacagtgagctcatctgactgttttaggatgtacagcctagtgttaacattcttggtatctttttgtgccttatctaaaacatttctcgatcactggtttcagatgttcatttattatattcttttcaaagattcagagattggcttttgtcatccactattgtatgttttgtttcattgacctctagtgataccttgatctttcccactttctgttttcggattggagaagatgtaccttttttgtcaactcttacttttatcagatgatcaactcacgtatttggatctttatttgttttctcaaataaatatttaaggttaaaaaaaaaaaaaaaaaaa

SEQ ID NO: 447 - protein, 277 aa, Homo sapiens; identical to SEQ ID NO: 445

SEQ ID NO: 448 - DNA, 1851 bp, Homo sapiens
ggcacgagctcggctcctggaaagatggaggcagcggagacagaggcggaagctgcagccctagaggtcctggctgaggtggcaggcatcttggaacctgtaggcctgcaggaggaggcagaactgccagccaagatcctggttgagtttgtggtggactctcagaagaaagacaagctgctctgcagccagcttcaggtagcggatttcctgcagaacatcctggctcaggaggacactgctaagggtctcgaccccttggcttctgaagacacgagccgacagaaggcaattgcagctaaggaacaatggaaagagctgaaggccacctacagggagcacgtagaggccatcaaaattggcctcaccaaggccctgactcagatggaggaagcccagaggaaacggacacaactccgggaagcctttgagcagctccaggccaagaaacaaatggccatggagaaacgcagagcagtccagaaccagtggcagctacaacaggagaagcatctgcagcatctggcggaggtttctgcagaggtgagggagcgtaagacagggactcagcaggagcttgacagggtgtttcagaaacttggaaacctgaagcagcaggcagaacaggagcgggacaagctgcagaggtatcagaccttcctccagcttctgtataccctgcagggtaagctgttgttccctgaggctgaggctgaggcagagaatcttccagatgataaaccccagcagccgactcgaccccaggagcagagtacaggagacaccatggggagagaccctggtgtgtccttcaaggctgttggtctacaacctgctggagatgtaaatttgccatgacttcctggaggacagcagcatggagaaagatcctagaaaaggtcagacccaactcaggccttggtgtccctggactgcaagtgtggaaggagggaaagcctggtttacctctctctgcatctgagctctgctacccatggagcagatggatggtgggaacaggaaagagcttatgttacacctcattcccatgcttagcccacccagagctaacccctgtcttcttccccaggcctctgacttccctcacctcccaaccatcattacaggaaagactgtgaactcctgagttcagcttgatttctgactacatcccagcaagctctggcatctgtggattaaaatccctggatctctctcagttgtgtatttgttcatcttcatatgctggcaggaacaactattaatacagatactcagaagccaataacatgacaggagctgggactggtttgaacacagggtgtgcagatggggagggggtactggccttgggcctcctatgatgcagacatggtgaatttaattcaaggaggaggagaatgttttaggcaggtggttatatgtgggaagataattttattcatggatccaaatgtttgttgagtccttttgtgctaaggttcttgcggtgaaccagaattataacagtgagctcatctgactgttttaggatgtacagcctagtgttaacattcttggtatctttttgtgccttatctaaaacatttctcgatcactggtttcagatgttcatttattatattcttttcaaagattcagagattggcttttgtcatccactattgtatgttttgtttcattgacctctagtgataccttgatctttcccactttctgttttcggattggagaagatgtaccttttttgtcaactcttacttttatcagatgatcaactcacgtatttggatctttatttgttttctcaaataaatatttaaggttaaaaaaaaaaaaaaaaaaaaaaaa

SEQ ID NO: 449 - protein, 211 aa, Homo sapiens
MAARRGALIVLEGVDRAGKSTQSRKLVEALSRGPPPELLRFPERSTEIGKLLSSYLQKKSDVEDHSVHLLFSANRWEQVPLIKEKLSQGVTLVVDRYAFSGVAFTGAKENFSLDWCKQPDVGLPKPDLVLFLQLQLADAAKRGAFGHERYENGAFQERALRCFHQLMKDTTLNWKMVDASKRLEAVHEELRVLSEDAIRTATEKPLGELWK

SEQ ID NO: 450 - DNA, 1000 bp, Homo sapiens
aattcgccagcggcgcggtggacagtcatggcggcccggcgcggggctctcatagtgctggagggcgtggaccgcgccgggaagagcacgcagagccgcaagctggtggaagcgctgtcgcgcgggccaccgcccgaactgctccggttcccggaaagatcaactgaaatcggcaaacttctgagttcctacttgcaaaagaaaagtgacgtggaggatcactcggtgcacctgcttttttctgcaaatcgctgggaacaagtgccgttaattaaggaaaagttgagccagggcgtgaccctcgtcgtggacagatacgcattttctggtgtggccttcaccggtgccaaggagaatttttccctagactggtgtaaacagccagacgtgggccttcccaaacccgacctggtcctgttcctccagttacagctggcggatgctgccaagcggggagcgtttggccatgagcgctatgagaacggggctttccaggagcgggcgctccggtgtttccaccagctcatgaaagacacgactttgaactggaagatggtggatgcttccaaaagactcgaagctgtccatgaggaactccgcgtgctctctgaggacgccatccgcactgccacagagaagccgctgggggagctatggaagtgacccaaggctgcccactggagacgcctctccctgcagtcccccgagaggtgggagactcgcggaaggccccgtccccagcggagtccagaccccacaacttcaggagctctttcccggcagcagagatctgcaggctgcctcttctgccccggagctggggtgcactggggacccccgtggtggggaccttggcagtgtggacatgagcagagcgatggagcagtctcctgccctctcccctgtcctgatggcactctgttgtattttcttactgaagttcagtgataactctgagcagtttcattgtgatcactgtaaatggtaatcagttggaatt

SEQ ID NO: 451 - protein, 282 aa, Homo sapiens
MPLLTQQIQDEDDQYSLVASLDNVRNLSTILKAIHFREHATCFATKNGIKVTVENAKCVQANAFIQAGIFQEFKVQEESVTFRINLTVLLDCLSIFGSSPMPGTLTALRMCYQGYGYPLMLFLEEGGVVTVCKINTQEPEETLDFDFCSTNVINKIILQSEGLREAFSELDMTSEVLQITMSPDKPYFRLSTFGNAGSSHLDYPKDSDLMEAFHCNQTQVNRYKISLLKPSTKALVLSCKVSIRTDNRGFLSLQYMIRNEDGQICFVEYYCCPDEEVPESES

SEQ ID NO: 452 - DNA, 1776 bp, Homo sapiens
ctctatggttcggcggctctaagcgctcagctccgcggtcgtcctccaggtctgtgccgcctccctccggtctcggtggcgcggcacgcgcggctctctaggcctccttcagctctgtggtgacggtggccgaggtggagggccggtctgaagagtggcgggactggcttcacttcctccgcggttcctcggagccgcctcgctcctcttcagggactttgctgagaagggctctcgggcgtccagaccccaccgcaaaggtgtttggcgatccgccgagaagttgttggccccaggagcatccctcggggccgaatgcgcagtggacgatgccccttctgacccaacagatccaagacgaggatgatcagtacagccttgtggccagccttgacaacgttaggaatctctccactatcttgaaagctattcatttccgagaacatgccacgtgtttcgcaactaaaaatggtatcaaagtaacagtggaaaatgcaaagtgtgtgcaagcaaatgcttttattcaggctggaatatttcaggagtttaaagttcaggaagagtctgttacttttcgaattaatttaactgtccttttagactgtttatctatttttggatcaagtcctatgccagggactttaactgcacttcgaatgtgttaccaaggttatggttaccctttgatgctgttcctggaagaaggaggagtggtgacagtctgcaaaatcaatacacaggaacctgaggagaccctggactttgatttctgcagcaccaatgttattaataaaattattctgcagtcagaggggctccgtgaagcattttctgaattggatatgacgagtgaagtcctacaaattaccatgtctcctgacaagccttatttcaggttatctacttttggaaatgcaggaagttcccaccttgactatcccaaagattctgatttgatggaagcatttcattgtaatcagacccaagtcaacagatacaagatttccttactgaaaccctctacaaaggcattagtcctatcttgtaaggtatctattcggacagataacagaggcttcctttcattacagtatatgattagaaatgaagatggacaaatatgttttgtggaatattactgctgccctgatgaagaagttcctgaatctgagtcttgagtatgacaattcactgatatttatgtgtacatttatgatagatgaagttcttattctgagtacagtactctttgtcatttcatattggattttctatagagaagaagcacaatggggaagataggagcaaggtcatgtaccctaatagttactatgttttgtaaatccattttgtagagggcatgtaaataaatgttttcctgtagtcatagattattcaggactgtcctttagttctgtcttttgaactcatgggaataattgtgagtcagcgtaacatttcaagagtctaaaggtggccgggtgtggtggctttaatcccagcactttgggaacccgaggtgggcggatcacctgaggtcaggagttcgaaaccagcctgaccaacgtggagaaaccccatctctactaaaaatacaaaaaattagccggacgtggtggcacatgcctgtaatgccagctactcgggaggctgaggcaggaaaattgcttgaacccgggaggcggaggttgtggtgagctgaaatgacgccattgcactccagcctaggcaataagagcaaaactctgcctcaaaaaaaaaaaaaaaaaaaaaaaa

SEQ ID NO: 453 - protein, 838 aa, Homo sapiens
MSLQVLNDKNVSNEKNTENCDFLFSPPEVTGRSSVLRVSQKENVPPKNLAKAMKVTFQTPLRDPQTHRILSPSMASKLEAPFTQDDTLGLENSHPVWTQKENQQLIKEVDAKTTHGILQKPVEADTDLLGDASPAFGSGSSSESGPGALADLDCSSSSQSPGSSENQMVSPGKVSGSPEQAVEENLSSYSLDRRVTPASETLEDPCRTESQHKAETPHGAEEECKAETPHGAEEECRHGGVCAPAAVATSPPGAIPKEACGGAPLQGLPGEALGCPAGVGTPVPADGTQTLTCAHTSAPESTAPTNHLVAGRAMTLSPQEEVAAGQMASSSRSGPVKLEFDVSDGATSKRAPPPRRLGERSGLKPPLRKAAVRQQKAPQEVEEDDGRSGAGEDPPMPASRGSYHLDWDKMDDPNFIPFGGDTKSGCSEAQPPESPETRLGQPAAEQLHAGPATEEPGPCLSQQLHSASAEDTPVVQLAAETPTAESKERALNSASTSLPTSCPGSEPVPTHQQGQPALELKEESFRDPAEVLGTGAEVDYLEQFGTSSFKESALRKQSLYLKFDPLLRDSPGRPVPVATETSSMHGANETPSGRPREAKLVEFDFLGALDIPVPGPPPGVPAPGGPPLSTGPIVDLLQYSQKDLDAVVKATQEENRELRSRCEELHGKNLELGKIMDRFEEVVYQAMEEVQKQKELSKAEIQKVLKEKDQLTTDLNSMEKSFSDLFKRFEKQKEVIEGYRKNEESLKKCVEDYLARITQEGQRYQALKAHAEEKLQLANEEIAQVRSKAQAEALALQASLRKEQMRIQSLEKTVEQKTKENEELTRICDDLISKMEKI

SEQ ID NO: 454 - DNA, 2788 bp, Homo sapiens
ggcggcggtagcagccaggcttggcccccggcgtggagcagacgcggacccctccttcctggcggcggcggcgcgggctcagagcccggcaacgggcgggcgggcagaatgagtctgcaggtcttaaacgacaaaaatgtcagcaatgaaaaaaatacagaaaattgcgacttcctgttttcgccaccagaagttaccggaagatcgtctgttcttcgtgtgtcacagaaagaaaatgtgccacccaagaacctggccaaagctatgaaggtgacttttcagacacctctgcgggatccacagacgcacaggattctaagtcctagcatggccagcaaacttgaggctcctttcactcaggatgacacccttggactggaaaactcacacccggtctggacacagaaagagaaccaacagctcatcaaggaagtggatgccaaaactactcatggaattctacagaaaccagtggaggctgacaccgacctcctgggggatgcaagcccagcctttgggagtggcagctccagcgagtctggcccaggtgccctggctgacctggactgctcaagctcttcccagagcccaggaagttctgagaaccaaatggtgtctccaggaaaagtgtctggcagccctgagcaagccgtggaggaaaaccttagttcctattccttagacagaagagtgacacccgcctctgagaccctagaagacccttgcaggacagagtcccagcacaaagcggagactccgcacggagccgaggaagaatgcaaagcggagactccgcacggagccgaggaggaatgccggcacggtggggtctgtgctcccgcagcagtggccacttcgcctcctggtgcaatccctaaggaagcctgcggaggagcacccctgcagggtctgcctggcgaagccctgggctgccctgcgggtgtgggcacccccgtgccagcagatggcactcagacccttacctgtgcacacacctctgctcctgagagcacagccccaaccaaccacctggtggctggcagggccatgaccctgagtcctcaggaagaagtggctgcaggccaaatggccagctcctcgaggagcggacctgtaaaactagaatttgatgtatctgatggcgccaccagcaaaagggcacccccaccaaggagactgggagagaggtccggcctcaagcctcccttgaggaaagcagcagtgaggcagcaaaaggccccgcaggaggtggaggaggacgacggtaggagcggagcaggagaggacccccccatgccagcttctcggggctcttaccacctcgactgggacaaaatggatgacccaaacttcatcccgttcggaggtgacaccaagtctggttgcagtgaggcccagcccccagaaagccctgagaccaggctgggccagccagcggctgaacagttgcatgctgggcctgccacggaggagccaggtccctgtctgagccagcagctgcattcagcctcagcggaggacacgcctgtggtgcagttggcagccgagaccccaacagcagagagcaaggagagagccttgaactctgccagcacctcgcttcccacaagctgtccaggcagtgagccagtgcccacccatcagcaggggcagcctgccttggagctgaaagaggagagcttcagagaccccgctgaggttctaggcacgggcgcggaggtggattacctggagcagtttggaacttcctcgtttaaggagtcggccttgaggaagcagtccttatacctcaagttcgaccccctcctgagggacagtcctggtagaccagtgcccgtggccaccgagaccagcagcatgcacggtgcaaatgagactccctcaggacgtccgcgggaagccaagcttgtggagttcgatttcttgggagcactggacattcctgtgccaggcccacccccaggtgttcccgcgcctgggggcccacccctgtccaccggacctatagtggacctgctccagtacagccagaaggacctggatgcagtggtaaaggcgacacaggaggagaaccgggagctgaggagcaggtgtgaggagctccacgggaagaacctggaactggggaagatcatggacaggttcgaagaggttgtgtaccaggccatggaggaagttcagaagcagaaggaactttccaaagctgaaatccagaaagttctaaaagaaaaagaccaacttaccacagatctgaactccatggagaagtccttctccgacctcttcaagcgttttgagaaacagaaagaggtgatcgagggctaccgcaagaacgaagagtcactgaagaagtgcgtggaggattacctggcaaggatcacccaggagggccagaggtaccaagccctgaaggcccacgcggaggagaagctgcagctggcaaacgaggagatcgcccaggtccggagcaaggcccaggcggaagcgttggccctccaggccagcctgaggaaggagcagatgcgcatccagtcgctggagaagacagtggagcagaagactaaagagaacgaggagctgaccaggatctgcgacgacctcatctccaagatggagaagatctgacctccacggagccgctgtccccgcccccctgctcccgtctgtctgtcctgtctgattctcttaggtgtcatgttcttttttctgtcttgtcttcaactttttttaaaactagattgctttgaaaacatgactcaataaaagtttcctttcaatttaaaaaaaa

SEQ ID NO: 455 - protein, 720 aa, Homo sapiens
MDDPKKEDILLLADEKFDFDLSLSSSSANEDDEVFFGPFGHKERCIAASLELNNPVPEQPPLPTSESPFAWSPLAGEKFVEVYKEAHLLALHIESSSRNQAAQAAKPEDPRSQGVERFIQESKLKINLFEKEKEMKKSPTSLKRETYYLSDSPLLGPPVGEPRLLASSPALPSSGAQARLTRAPGPPHSAHALPRESCTAHAASQAATQRKPGTKLLLPRAASVRGRSIPGAAEKPKKEIPASPSRTKIPAEKESHRDVLPDKPAPGAVNVPAAGSHLGQGKRAIPVPNKLGLKKTLLKAPGSTSNLARKSSSGPVWSGASSACTSPAVGKAKSSEFASIPANSSRPLSNISKSGRMGPAMLRPALPAGPVGASSWQAKRVDVSELAAEQLTAPPSASPTQPQTPEGGGQWLNSSCAWSESSQLNKTRSIRRRDSCLNSKTKVMPTPTNQFKIPKFSIGDSPDSSTPKLSRAQRPQSCTSVGRVTVHSTPVRRSSGPAPQSLLSARRVSALPTPASRRCSGLPPMTPKTMPRAVGSPLCVPARRRSSEPRKNSAMRTEPTRESNRKTDSRLVDVSPDRGSPPSRVPQALNFSPEESDSTFSKSTATEVAREEAKPGGDAAPSEALLVDIKLEPLAVTPDAASQPLIDLPLIDFCDTPEAHVAVGSESRPLIDLMTNTPDMNKNVAKPSPVVGQLIDLSSPLIQLSPEADKENVDSPLLKF

SEQ ID NO: 456 - DNA, 2917 bp, Homo sapiens
ggcacgagggcggcggccgcgatgagccttcagcctgccgggcaggggacgtgaacatggatgaccctaagaaggaagacattcttcttttggccgatgaaaaatttgacttcgatctttcattgtcttcttcgagtgcaaatgaagatgatgaagtcttcttcggaccctttggacataaagaaagatgtattgctgccagcttggaattaaataatccggttcccgaacagcctccgttgcccacatctgagagtccctttgcctggagccctctggccggggagaagttcgtggaggtgtacaaagaagctcacttactggctttacacattgagagcagcagccggaaccaggcagcccaagctgccaagcctgaagaccctcggagccagggcgtggaaagattcatacaggagtcaaaattaaaaataaacctctttgagaaagaaaaggaaatgaagaaaagccccacgtctcttaaaagggagacatactacctgtcagacagccccttgctggggccccctgtgggtgagcctcggctcttggcctcctccccggccctgcccagctctggtgcccaggcccgcctcacccgggcgccggggcctccgcactctgctcatgctttgcccagggaatcatgcactgctcatgctgcaagtcaggcagcgactcagaggaagcccgggaccaaattgctgctgcctcgagcggcctctgttagaggaagaagcatccctggggctgcggagaagcccaagaaagagattccagctagtccttccaggacaaaaatcccagctgagaaggaatcccaccgggatgttctccctgacaaacctgccccgggtgctgtcaatgtgccggccgccggaagccacttgggccagggcaagcgggcgatccctgttccaaacaagttggggctgaagaagaccctgttaaaagcacccggctctaccagcaatctcgcaaggaagtcctcctcggggcctgtttggagcggggcatccagtgcgtgcacatccccagcagtgggcaaagctaaatcaagtgaatttgcaagtattcctgcaaatagctcccggcctctgtcaaacatcagcaagtcaggcagaatgggacccgccatgctgcggccagctctgcctgcaggccctgtgggggcatcctcctggcaggccaagcgggtcgatgtttctgagctggcagcggagcagctcacggcacccccctcagcatcccccacccaaccccagactccggaaggtggcggccagtggctgaactccagttgcgcttggtcagaatcttctcaattgaataagactagaagtatcagacggcgagattcctgtctaaattccaagacaaaggttatgcctactcctacaaatcaatttaaaattcctaagttttctattggtgactccccggacagctcaacaccaaagctttcgcgggcacagcggccgcagtcgtgcacgtcagttggcagggtcactgtccacagcaccccggttagacgctcatctgggccagcaccacaaagcctgctgagcgcacggcgtgtgtcagccttgcccacacccgccagccggcgctgctctggccttccaccgatgacccccaaaacgatgcccagggccgtgggctctcccctgtgtgtgccagctcggagacgttcctctgagccccgcaagaactctgcaatgagaactgaaccaacaagggagagcaacagaaagacagattccaggctggtggatgtgtcccctgacaggggttctcctccttcccgtgtgcctcaggcacttaacttttctccagaggaaagcgattctactttctccaaaagtactgccacagaagtagctcgggaggaagccaagccgggtggagatgcagcccctagtgaggctcttcttgtagatatcaaactggaaccactcgcggtcactccagatgctgcaagccagcccctcattgaccttcctctcatcgacttctgcgataccccagaagcacacgtggctgtaggatctgaaagcaggcctctgatcgacctcatgacaaacactccagacatgaataaaaatgtggccaaaccttcaccggtggtgggacagctcatagacctgagctcccctctgatccagctgagccctgaggctgacaaggagaacgtggattccccactcctcaagttctaagccgaaccaaatcctttgccttgaaagaacagccctaaagtggttttcaaccctcagaaacaagctttaggctggtcgcagtggcttacacttgtaaccctagaacttgggaggctgaggtgggcggattacttgagcccaggagttcgggaccagcctgggaaatatagtgaaactcctgtccctacaaaaagtacaaaaattagccgggtgtggtagtgcatgcctgtagtcccagctacttgggaggctgaagtgggaggatggcctgagctcaaggagatgcaggctgcagtgggctgtgattgtgccactgcactccagcctgggcaccaatgtgagaacctgtcttggaaaaaaaaaaaaaaagaaacatgttttagtagaagttttatttgaaaaagaaaaataagcataaatatattcccagtgctggagagggtgggctgagggactggggccagcacggaccacccaaggcctctgcttcccgccgccaccctcctcgctgccattctctgggctggaatgtgaagcctcagtcactctaaatgaagaattttcttttgaatgttttgtatgtaaaatagcaagtggctatttttaaagttaagtttgtataaatagttagatattctagatttacattaaattgtaaaataaatggacttattgaagcataaaaaaaaaaaaaaaaa

SEQ ID NO: 457 - protein, 389 aa, Homo sapiens
MLSLRVPLAPITDPQQLQLSPLKGLSLVDKENTPPALSGTRVLASKTARRIFQEPTEPKTKAAAPGVEDEPLLRENPRRFVIFPIEYHDIWQMYKKAEASFWTAEEVDLSKDIQHWESLKPEERYFISHVLAFFAASDGIVNENLVERFSQEVQITEARCFYGFQIAMENIHSEMYSLLIDTYIKDPKEREFLFNAIETMPCVKKKADWALRWIGDKEATYGERVVAFAAVEGIFFSGSFASIFWLKKRGLMPGLTFSNELISRDEGLHCDFACLMFKHLVHKPSEERVREIIINAVRIEQEFLTEALPVKLIGMNCTLMKQYIEFVADRLMLELGFSKVFRVENPFDFMENISLEGKTNFFEKRVGEYQRMGVMSSPTENSFTLDADF

SEQ ID NO: 458 - DNA, 2500 bp, Homo sapiens
cccaggcgcagccaatgggaagggtcggaggcatggcacagccaatgggaagggccggggcaccaaagccaatgggaagggccgggagcgcgcggcgcgggagatttaaaggctgctggagtgaggggtcgcccgtgcaccctgtcccagccgtcctgtcctggctgctcgctctgcttcgctgcgcctccactatgctctccctccgtgtcccgctcgcgcccatcacggacccgcagcagctgcagctctcgccgctgaaggggctcagcttggtcgacaaggagaacacgccgccggccctgagcgggacccgcgtcctggccagcaagaccgcgaggaggatcttccaggagcccacggagccgaaaactaaagcagctgcccccggcgtggaggatgagccgctgctgagagaaaacccccgccgctttgtcatcttccccatcgagtaccatgatatctggcagatgtataagaaggcagaggcttccttttggaccgccgaggaggttgacctctccaaggacattcagcactgggaatccctgaaacccgaggagagatattttatatcccatgttctggctttctttgcagcaagcgatggcatagtaaatgaaaacttggtggagcgatttagccaagaagttcagattacagaagcccgctgtttctatggcttccaaattgccatggaaaacatacattctgaaatgtatagtcttcttattgacacttacataaaagatcccaaagaaagggaatttctcttcaatgccattgaaacgatgccttgtgtcaagaagaaggcagactgggccttgcgctggattggggacaaagaggctacctatggtgaacgtgttgtagcctttgctgcagtggaaggcattttcttttccggttcttttgcgtcgatattctggctcaagaaacgaggactgatgcctggcctcacattttctaatgaacttattagcagagatgagggtttacactgtgattttgcttgcctgatgttcaaacacctggtacacaaaccatcggaggagagagtaagagaaataattatcaatgctgttcggatagaacaggagttcctcactgaggccttgcctgtgaagctcattgggatgaattgcactctaatgaagcaatacattgagtttgtggcagacagacttatgctggaactgggttttagcaaggttttcagagtagagaacccatttgactttatggagaatatttcactggaaggaaagactaacttctttgagaagagagtaggcgagtatcagaggatgggagtgatgtcaagtccaacagagaattcttttaccttggatgctgacttctaaatgaactgaagatgtgcccttacttggctgattttttttttccatctcataagaaaaatcagctgaagtgttaccaactagccacaccatgaattgtccgtaatgttcattaacagcatctttaaaactgtgtagctacctcacaaccagtcctgtctgtttatagtgctggtagtatcaccttttgccagaaggcctggctggctgtgacttaccatagcagtgacaatggcagtcttggctttaaagtgaggggtgaccctttagtgagcttagcacagcgggattaaacagtcctttaaccagcacagccagttaaaagatgcagcctcactgcttcaacgcagattttaatgtttacttaaatataaacctggcactttacaaacaaataaacattgttttgtactcacggcggcgataatagcttgatttatttggtttctacaccaaatacattctcctgaccactaatgggagccaattcacaattcactaagtgactaaagtaagttaaacttgtgtagactaagcatgtaatttttaagttttattttaatgaattaaaatatttgttaaccaactttaaagtcagtcctgtgtatacctagatattagtcagttggtgccagatagaagacaggttgtgtttttatcctgtggcttgtgtagtgtcctgggattctctgccccctctgagtagagtgttgtgggataaaggaatctctcagggcaaggagcttcttaagttaaatcactagaaatttaggggtgatctgggccttcatatgtgtgagaagccgtttcattttatttctcactgtattttcctcaacgtctggttgatgagaaaaaattcttgaagagttttcatatgtgggagctaaggtagtattgtaaaatttcaagtcatccttaaacaaaatgatccacctaagatcttgcccctgttaagtggtgaaatcaactagaggtggttcctacaagttgttcattctagttttgtttggtgtaagtaggttgtgtgagttaattcatttatatttactatgtctgttaaatcagaaattttttattatctatgttcttctagattttacctgtagttcataaaaaaaaaaaaaaaaaaaaaaaaa

SEQ ID NO: 459 - protein, 890 aa, Homo sapiens
MSQGILSPPAGLLSDDDVVVSPMFESTAADLGSVVRKNLLSDCSVVSTSLEDKQQVPSEDSMEKVKVYLRVRPLLPSELERQEDQGCVRIENVETLVLQAPKDSFALKSNERGIGQATHRFTFSQIFGPEVGQASFFNLTVKEMVKDVLKGQNWLIYTYGVTNSGKTHTIQGTIKDGGILPRSLALIFNSLQGQLHPTPDLKPLLSNEVIWLDSKQIRQEEMKKLSLLNGGLQEEELSTSLKRSVYIESRIGTSTSFDSGIAGLSSISQCTSSSQLDETSHRWAQPDTAPLPVPANIRFSIWISFFEIYNELLYDLLEPPSQQRKRQTLRLCEDQNGNPYVKDLNWIHVQDAEEAWKLLKVGRKNQSFASTHLNQNSSRSHSIFSIRILHLQGEGDIVPKISELSLCDLAGSERCKDQKSGERLKEAGNINTSLHTLGRCIAALRQNQQNRSKQNLVPFRDSKLTRVFQGFFTGRGRSCMIVNVNPCASTYDETLHVAKFSAIASQLVHAPPMQLGFPSLHSFIKEHSLQVSPSLEKGAKADTGLDDDIENEADISMYGKEELLQVVEAMKTLLLKERQEKLQLEMHLRDEICNEMVEQMQQREQWCSEHLDTQKELLEEMYEEKLNILKESLTSFYQEEIQERDEKIEELEALLQEARQQSVAHQQSGSELALRRSQRLAASASTQQLQEVKAKLQQCKAELNSTTEELHKYQKMLEPPPSAKPFTIDVDKKLEEGQKNIRLLRTELQKLGESLQSAERACCHSTGAGKLRQALTTCDDILIKQDQTLAELQNNMVLVKLDLRKKAACIAEQYHTVLKLQGQVSAKKRLGTNQENQQPNQQPPGKKPFLRNLLPRTPTCQSSTDCSPYARILRSRRSPLLKSGPFGKKY

SEQ ID NO: 460 - DNA, 2972 bp, Homo sapiens
tcttcggacctaggctgccctgccgtcatgtcgcaagggatcctttctccgccagcgggcttgctgtccgatgacgatgtcgtagtttctcccatgtttgagtccacagctgcagatttggggtctgtggtacgcaagaacctgctatcagactgctctgtcgtctctacctccctagaggacaagcagcaggttccatctgaggacagtatggagaaggtgaaagtatacttgagggttaggcccttgttaccttcagagttggaacgacaggaagatcagggttgtgtccgtattgagaatgtggagacccttgttctacaagcacccaaggactcgtttgccctgaagagcaatgaacggggaattggccaagccacacacaggttcaccttttcccagatctttgggccagaagtgggacaggcatccttcttcaacctaactgtgaaggagatggtaaaggatgtactcaaagggcagaactggctcatctatacatatggagtcactaactcagggaaaacccacacgattcaaggtaccatcaaggatggagggattctcccccggtccctggcgctgatcttcaatagcctccaaggccaacttcatccaacacctgatctgaagcccttgctctccaatgaggtaatctggctagacagcaagcagatccgacaggaggaaatgaagaagctgtccctgctaaatggaggcctccaagaggaggagctgtccacttccttgaagaggagtgtctacatcgaaagtcggataggtaccagcaccagcttcgacagtggcattgctgggctctcttctatcagtcagtgtaccagcagtagccagctggatgaaacaagtcatcgatgggcacagccagacactgccccactacctgtcccggcaaacattcgcttctccatctggatctcattctttgagatctacaacgaactgctttatgacctattagaaccgcctagccaacagcgcaagaggcagactttgcggctatgcgaggatcaaaatggcaatccctatgtgaaagatctcaactggattcatgtgcaagatgctgaggaggcctggaagctcctaaaagtgggtcgtaagaaccagagctttgccagcacccacctcaaccagaactccagccgcagtcacagcatcttctcaatcaggatcctacaccttcagggggaaggagatatagtccccaagatcagcgagctgtcactctgtgatctggctggctcagagcgctgcaaagatcagaagagtggtgaacggttgaaggaagcaggaaacattaacacctctctacacaccctgggccgctgtattgctgcccttcgtcaaaaccagcagaaccggtcaaagcagaacctggttcccttccgtgacagcaagttgactcgagtgttccaaggtttcttcacaggccgaggccgttcctgcatgattgtcaatgtgaatccctgtgcatctacctatgatgaaactcttcatgtggccaagttctcagccattgctagccagcttgtgcatgccccacctatgcaactgggattcccatccctgcactcgttcatcaaggaacatagtcttcaggtatcccccagcttagagaaaggggctaaggcagacacaggccttgatgatgatattgaaaatgaagctgacatctccatgtatggcaaagaggagctcctacaagttgtggaagccatgaagacactgcttttgaaggaacgacaggaaaagctacagctggagatgcatctccgagatgaaatttgcaatgagatggtagaacagatgcaacagcgggaacagtggtgcagtgaacatttggacacccaaaaggaactattggaggaaatgtatgaagaaaaactaaatatcctcaaggagtcactgacaagtttttaccaagaagagattcaggagcgggatgaaaagattgaagagctagaagctctcttgcaggaagccagacaacagtcagtggcccatcagcaatcagggtctgaattggccctacggcggtcacaaaggttggcagcttctgcctccacccagcagcttcaggaggttaaagctaaattacagcagtgcaaagcagagctaaactctaccactgaagagttgcataagtatcagaaaatgttagaaccaccaccctcagccaagcccttcaccattgatgtggacaagaagttagaagagggccagaagaatataaggctgttgcggacagagcttcagaaacttggtgagtctctccaatcagcagagagagcttgttgccacagcactggggcaggaaaacttcgtcaagccttgaccacttgtgatgacatcttaatcaaacaggaccagactctggctgaactgcagaacaacatggtgctagtgaaactggaccttcggaagaaggcagcatgtattgctgagcagtatcatactgtgttgaaactccaaggccaggtttctgccaaaaagcgccttggtaccaaccaggaaaatcagcaaccaaaccaacaaccaccagggaagaaaccattccttcgaaatttacttccccgaacaccaacctgccaaagctcaacagactgcagcccttatgcccggatcctacgctcacggcgttcccctttactcaaatctgggccttttggcaaaaagtactaaggctgtggggaaagagaagagcagtcatggccctgaggtgggtcagctactctcctgaagaaataggtctcttttatgctttaccatatatcaggaattatatccaggatgcaatactcagacactagcttttttctcacttttgtattataaccacctatgtaatctcatgttgttgtttttttttatttacttatatgatttctatgcacacaaaaacagttatattaaagatattattgttcacattttttattgaaaaaaaaaaaaaa

SEQ ID NO: 461 - protein, 719 aa, Homo sapiens
MALKDYALEKEKVKKFLQEFYQDDELGKKQFKYGNQLVRLAHREQVALYVDLDDVAEDDPELVDSICENARRYAKLFADAVQELLPQYKEREVVNKDVLDVYIEHRLMMEQRSRDPGMVRSPQNQYPAELMRRFELYFQGPSSNKPRVIREVRADSVGKLVTVRGIVTRVSEVKPKMVVATYTCDQCGAETYQPIQSPTFMPLIMCPSQECQTNRSGGRLYLQTRGSRFIKFQEMKMQEHSDQVPVGNIPRSITVLVEGENTRIAQPGDHVSVTGIFLPILRTGFRQVVQGLLSETYLEAHRIVKMNKSEDDESGAGELTREELRQIAEEDFYEKLAASIAPEIYGHEDVKKALLLLLVGGVDQSPRGMKIRGNINICLMGDPGVAKSQLLSYIDRLAPRSQYTTGRGSSGVGLTAAVLRDSVSGELTLEGGALVLADQGVCCIDEFDKMAEADRTAIHEVMEQQTISIAKAGILTTLNARCSILAAANPAYGRYNPRRSLEQNIQLPAALLSRFDLLWLIQDRPDRDNDLRLAQHITYVHQHSRQPPSQFEPLDMKLMRRYIAMCREKQPMVPESLADYITAAYVEMRREAWASKDATYTSARTLLAILRLSTALARLRMVDVVEKEDVNEAIRLMEMSKDSLLGDKGQTARTQRPADVIFATVRELVSGGRSVRFSEAEQRCVSRGFTPAQFQAALDEYEELNVWQVNASRTRITFV

SEQ ID NO: 462 - DNA, 2821 bp, Homo sapiens
cgccccttcccagccccaagggtctaggatacagtctttgtagatgagcgggtcccccttggaggacagaatgaagaattgggaaatcatggccgttctggagagtagacaagaagacggcgaaagtcgggcctgccccgccctgcggccccggaacaaaagaacgcgtgtgcgctggccctttaagagcgattctcctccgcccgcgccagctcggaccgcgggaaacccggcgcctgcactaccccgcccggagattcccttccgacgcccgcaccgcctccccgtcactcattctaggcccgcacggtgattggcttgcggctagcgggaggtgaagaaggccgccttgtccgattggcccgcacgcagtggcgccggtcacgtggggggcgacgtttcgcgccaatttcggttggccggccacagtccaccgcgcggagattctcagcttccccaggagcaagacctctgagcccgccaagcgcggccgcacggccctcggcagcgatggcactgaaggactacgcgctagagaaggaaaaggttaagaagttcttacaagagttctaccaggatgatgaactcgggaagaagcagttcaagtatgggaaccagttggttcggctggctcatcgggaacaggtggctctgtatgtggacctggacgacgtagccgaggatgaccccgagttggtggactcaatttgtgagaatgccaggcgctacgcgaagctctttgctgatgccgtacaagagctgctgcctcagtacaaggagagggaagtggtaaataaagatgtcctggacgtttacattgagcatcggctaatgatggagcagcggagtcgggaccctgggatggtccgaagcccccagaaccagtaccctgctgaactcatgcgcagatttgagctgtattttcaaggccctagcagcaacaagcctcgtgtgatccgggaagtgcgggctgactctgtggggaagttggtaactgtgcgtggaatcgtcactcgtgtctctgaagtcaaacccaagatggtggtggccacttacacttgtgaccagtgtggggcagagacctaccagccgatccagtctcccactttcatgcctctgatcatgtgcccaagccaggagtgccaaaccaaccgctcaggagggcggctgtatctgcagacacggggctccagattcatcaaattccaggagatgaagatgcaagaacatagtgatcaggtgcctgtgggaaatatccctcgtagtatcacggtgctggtagaaggagagaacacaaggattgcccagcctggagaccacgtcagcgtcactggtattttcttgccaatcctgcgcactgggttccgacaggtggtacagggtttactctcagaaacctacctggaagcccatcggattgtgaagatgaacaagagtgaggatgatgagtctggggctggagagctcaccagggaggagctgaggcaaattgcagaggaggatttctacgaaaagctggcagcttcaatcgccccagaaatatacgggcatgaagatgtgaagaaggcactgctgctcctgctagtcgggggtgtggaccagtctcctcgaggcatgaaaatccggggcaacatcaacatctgtctgatgggggatcctggtgtggccaagtctcagctcctgtcatacattgatcgactggcgcctcgcagccagtacacaacaggccggggctcctcaggagtggggcttacggcagctgtgctgagagactccgtgagtggagaactgaccttagagggtggggccctggtgctggctgaccagggtgtgtgctgcattgatgagttcgacaagatggctgaggccgaccgcacagccatccacgaggtcatggagcagcagaccatctccattgccaaggccggcattctcaccacactcaatgcccgctgctccatcctggctgccgccaaccctgcctacgggcgctacaaccctcgccgcagcctggagcagaacatacagctacctgctgcactgctctcccggtttgacctcctctggctgattcaggaccggcccgaccgagacaatgacctacggttggcccagcacatcacctatgtgcaccagcacagccggcagcccccctcccagtttgaacctctggacatgaagctcatgaggcgttacatagccatgtgccgcgagaagcagcccatggtgccagagtctctggctgactacatcacagcagcatacgtggagatgaggcgagaggcttgggctagtaaggatgccacctatacttctgcccggaccctgctggctatcctgcgcctttccactgctctggcacgtctgagaatggtggatgtggtggagaaagaagatgtgaatgaagccatcaggctaatggagatgtcaaaggactctcttctaggagacaaggggcagacagctaggactcagagaccagcagatgtgatatttgccaccgtccgtgaactggtctcagggggccgaagtgtccggttctctgaggcagagcagcgctgtgtatctcgtggcttcacacccgcccagttccaggcggctctggatgaatatgaggagctcaatgtctggcaggtcaatgcttcccggacacggatcacttttgtctgattccagcctgcttgcaaccctggggtcctcttgttccctgctggcctgccccttgggaaggggcagtgatgcctttgaggggaaggaggagcccctctttctcccatgctgcacttactccttttgctaataaaagtgtttgtagattgtc

SEQ ID NO: 463 - protein, 1124 aa, Homo sapiens
MDPFTEKLLERTRARRENLQRKMAERPTAAPRSMTHAKRARQPLSEASNQQPLSGGEEKSCTKPSPSKKRCSDNTEVEVSNLENKQPVESTSAKSCSPSPVSPQVQPQAADTISDSVAVPASLLGMRRGLNSRLEATAASSVKTRMQKLAEQRRRWDNDDMTDDIPESSLFSPMPSEEKAASPPRPLLSNASATPVGRRGRLANLAATICSWEDDVNHSFAKQNSVQEQPGTACLSKFSSASGASARINSSSVKQEATFCSQRDGDASLNKALSSSADDASLVNASISSSVKATSPVKSTTSITDAKSCEGQNPELLPKTPISPLKTGVSKPIVKSTLSQTVPSKGELSREICLQSQSKDKSTTPGGTGIKPFLERFGERCQEHSKESPARSTPHRTPIITPNTKAIQERLFKQDTSSSTTHLAQQLKQERQKELACLRGRFDKGNIWSAEKGGNSKSKQLETKQETHCQSTPLKKHQGVSKTQSLPVTEKVTENQIPAKNSSTEPKGFTECEMTKSSPLKITLFLEEDKSLKVTSDPKVEQKIEVIREIEMSVDDDDINSSKVINDLFSDVLEEGELDMEKSQEEMDQALAESSEEQEDALNISSMSLLAPLAQTVGVVSPESLVSTPRLELKDTSRSDESPKPGKFQRTRVPRAESGDSLGSEDRDLLYSIDAYRSQRFKETERPSIKQVIVRKEDVTSKLDEKNNAFPCQVNIKQKMQELNNEINMQQTVIYQASQALNCCVDEEHGKGSLEEAEAERLLLIATGKRTLLIDELNKLKNEGPQRKNKASPQSEFMPSKGSVTLSEIRLPLKADFVCSTVQKPDAANYYYLIILKAGAENMVATPLASTSNSLNGDALTFTTTFTLQDVSNDFEINIEVYSLVQKKDPSGLDKKKKTSKSKAITPKRLLTSITTKSNIHSSVMASPGGLSAVRTSNFALVGSYTLSLSSVGNTKFVLDKVPFLSSLEGHIYLKIKCQVNSSVEERGFLTIFEDVSGFGAWHRRWCVLSGNCISYWTYPDDEKRKNPIGRINLANCTSRQIEPANREFCARRNTFELITVRPQREDDRETLVSQCRDTLCVTKNWLSADTKEERDLWMQKLNQVLVDIRLWQPDACYKPIGKP

SEQ ID NO: 464 - DNA, 4786 bp, Homo sapiens
ctcggcgctgaaattcaaatttgaacggctgcagaggccgagtccgtcactggaagccgagaggagaggacagctggttgtgggagagttcccccgcctcagactcctggttttttccaggagacacactgagctgagactcacttttctcttcctgaatttgaaccaccgtttccatcgtctcgtagtccgacgcctggggcgatggatccgtttacggagaaactgctggagcgaacccgtgccaggcgagagaatcttcagagaaaaatggctgagaggcccacagcagctccaaggtctatgactcatgctaagcgagctagacagccactttcagaagcaagtaaccagcagcccctctctggtggtgaagagaaatcttgtacaaaaccatcgccatcaaaaaaacgctgttctgacaacactgaagtagaagtttctaacttggaaaataaacaaccagttgagtcgacatctgcaaaatcttgttctccaagtcctgtgtctcctcaggtgcagccacaagcagcagataccatcagtgattctgttgctgtcccggcatcactgctgggcatgaggagagggctgaactcaagattggaagcaactgcagcctcctcagttaaaacacgtatgcaaaaacttgcagagcaacggcgccgttgggataatgatgatatgacagatgacattcctgaaagctcactcttctcaccaatgccatcagaggaaaaggctgcttcccctcccagacctctgctttcaaatgcctcggcaactccagttggcagaaggggccgtctggccaatcttgctgcaactatttgctcctgggaagatgatgtaaatcactcatttgcaaaacaaaacagtgtacaagaacagcctggtaccgcttgtttatccaaattttcctctgcaagtggagcatctgctaggatcaatagcagcagtgttaagcaggaagctacattctgttcccaaagggatggcgatgcctctttgaataaagccctatcctcaagtgctgatgatgcgtctttggttaatgcctcaatttccagctctgtgaaagctacttctccagtgaaatctactacatctatcactgatgctaaaagttgtgagggacaaaatcctgagctacttccaaaaactcctattagtcctctgaaaacgggggtatcgaaaccaattgtgaagtcaactttatcccagacagttccatccaagggagaattaagtagagaaatttgtctgcaatctcaatctaaagacaaatctacgacaccaggaggaacaggaattaagcctttcctggaacgctttggagagcgttgtcaagaacatagcaaagaaagtccagctcgtagcacaccccacagaacccccattattactccaaatacaaaggccatccaagaaagattattcaagcaagacacatcttcatctactacccatttagcacaacagctcaagcaggaacgtcaaaaagaactagcatgtcttcgtggccgatttgacaagggcaatatatggagtgcagaaaaaggcggaaactcaaaaagcaaacaactagaaaccaaacaggaaactcactgtcagagcactcccctcaaaaaacaccaaggtgtttcaaaaactcagtcacttccagtaacagaaaaggtgaccgaaaaccagataccagccaaaaattctagtacagaacctaaaggtttcactgaatgcgaaatgacgaaatctagccctttgaaaataacattgtttttagaagaggacaaatccttaaaagtaacatcagacccaaaggttgagcagaaaattgaagtgatacgtgaaattgagatgagtgtggatgatgatgatatcaatagttcgaaagtaattaatgacctcttcagtgatgtcctagaggaaggtgaactagatatggagaagagccaagaggagatggatcaagcattagcagaaagcagcgaagaacaggaagatgcactgaatatctcctcaatgtctttacttgcaccattggcacaaacagttggtgtggtaagtccagagagtttagtgtccacacctagactggaattgaaagacaccagcagaagtgatgaaagtccaaaaccaggaaaattccaaagaactcgtgtccctcgagctgaatctggtgatagccttggttctgaagatcgtgatcttctttacagcattgatgcatatagatctcaaagattcaaagaaacagaacgtccatcaataaagcaggtgattgttcggaaggaagatgttacttcaaaactggatgaaaaaaataatgcctttccttgtcaagttaatatcaaacagaaaatgcaggaactcaataacgaaataaatatgcaacagacagtgatctatcaagctagccaggctcttaactgctgtgttgatgaagaacatggaaaagggtccctagaagaagctgaagcagaaagacttcttctaattgcaactgggaagagaacacttttgattgatgaattgaataaattgaagaacgaaggacctcagaggaagaataaggctagtccccaaagtgaatttatgccatccaaaggatcagttactttgtcagaaatccgcttgcctctaaaagcagattttgtctgcagtacggttcagaaaccagatgcagcaaattactattacttaattatactaaaagcaggagctgaaaatatggtagccacaccattagcaagtacttcaaactctcttaacggtgatgctctgacattcactactacatttactctgcaagatgtatccaatgactttgaaataaatattgaagtttacagcttggtgcaaaagaaagatccctcaggccttgataagaagaaaaaaacatccaagtccaaggctattactccaaagcgactcctcacatctataaccacaaaaagcaacattcattcttcagtcatggccagtccaggaggtcttagtgctgtgcgaaccagcaacttcgcccttgttggatcttacacattatcattgtcttcagtaggaaatactaagtttgttctggacaaggtcccctttttatcttctttggaaggtcatatttatttaaaaataaaatgtcaagtgaattccagtgttgaagaaagaggttttctaaccatatttgaagatgttagtggttttggtgcctggcatcgaagatggtgtgttctttctggaaactgtatatcttattggacttatccagatgatgagaaacgcaagaatcccataggaaggataaatctggctaattgtaccagtcgtcagatagaaccagccaacagagaattttgtgcaagacgcaacacttttgaattaattactgtccgaccacaaagagaagatgaccgagagactcttgtcagccaatgcagggacacactctgtgttaccaagaactggctgtctgcagatactaaagaagagcgggatctctggatgcaaaaactcaatcaagttcttgttgatattcgcctctggcaacctgatgcttgctacaaacctattggaaagccttaaaccgggaaatttccatgctatctagaggtttttgatgtcatcttaagaaacacacttaagagcatcagatttactgattgcattttatgctttaagtacgaaagggtttgtgccaatattcactacgtattatgcagtatttatatcttttgtatgtaaaactttaactgatttctgtcattcatcaatgagtagaagtaaatacattatagttgattttgctaaatcttaatttaaaagcctcattttcctagaaatctaattattcagttattcatgacaatatttttttaaaagtaagaaattctgagttgtcttcttggagctgtaggtcttgaagcagcaacgtctttcaggggttggagacagaaacccattctccaatctcagtagttttttcgaaaggctgtgatcatttattgatcgtgatatgacttgttactagggtactgaaaaaaatgtctaaggcctttacagaaacatttttagtaatgaggatgagaactttttcaaatagcaaatatatattggcttaaagcatgaggctgtcttcagaaaagtgatgtggacataggaggcaatgtgtgagacttgggggttcaatattttatatagaagagttaataagcacatggtttacatttactcagctactatatatgcagtgtggtgcacattttcacagaattctggcttcattaagatcattatttttgctgcgtagcttacagacttagcatattagttttttctactcctacaagtgtaaattgaaaaatctttatattaaaaaagtaaactgttatgaagctgctatgtactaataatactttgcttgccaaagtgtttgggttttgttgttgtttgtttgtttgtttgtttttggttcatgaacaacagtgtctagaaacccattttgaaagtggaaaattattaagtcacctatcacctttaaacgcctttttttaaaattataaaatattgtaaagcagggtctcaacttttaaatacactttgaacttcttctctgaattattaaagttctttatgacctcatttataaacactaaattctgtcacctcctgtcattttattttttattcattcaaatgtattttttcttgtgcatattataaaaatatattttatgagctcttactcaaataaatacctgtaaatgtctaaaggaaaaaaaaaaaaaaaaaa

SEQ ID NO: 465 - protein, 76 aa, Homo sapiens
MSKAHPPELKKFMDKKLSLKLNGGRHVQGILRGFDPFMNLVIDECVEMATSGQQNNIGMVVIRGNSIIMLEALERV

SEQ ID NO: 466 - DNA, 606 bp, Homo sapiens
agacgcaagacgccgggcctacagcgggagcgtgaggaaagccgtgcgttgcgttccaaggcatctgtgagcccgcggagtatacaccatgagcaaagctcaccctcccgagttgaaaaaatttatggacaagaagttatcattgaaattaaatggtggcagacatgtccaaggaatattgcggggatttgatccctttatgaaccttgtgatagatgaatgtgtggagatggcgactagtggacaacagaacaatattggaatggtggtaatacgaggaaatagtatcatcatgttagaagccttggaacgagtataaataatggctgttcagcagagaaacccatgtcctctctccatagggcctgttttactatgatgtaaaaattaggtcatgtacattttcatattagactttttgttaaataaacttttgtaatagtcaaaaatgctttctcagatgttctgaatatagaatatcagctctcattccagttttttctaacatgaattttcctggttgacattgatttcaaagggttttatgcattaaagtgaaagaatcttattaaatgcgaaaaaaaaaaaaaaaaaaaaaaaaaaaaa

SEQ ID NO: 467 - protein, 971 aa, Homo sapiens
MELSDANLQTLTEYLKKTLDPDPAIRRPAEKFLESVEGNQNYPLLLLTLLEKSQDNVIKVCASVTFKNYIKRNWRIVEDEPNKICEADRVAIKANIVHLMLSSPEQIQKQLSDAISIIGREDFPQKWPDLLTEMVNRFQSGDFHVINGVLRTAHSLFKRYRHEFKSNELWTEIKLVLDAFALPLTNLFKATIELCSTHANDASALRILFSSLILISKLFYSLNFQDLPEFFEDNMETWMNNFHTLLTLDNKLLQTDDEEEAGLLELLKSQICDNAALYAQKYDEEFQRYLPRFVTAIWNLLVTTGQEVKYDLLVSNAIQFLASVCERPHYKNLFEDQNTLTSICEKVIVPNMEFRAADEEAFEDNSEEYIRRDLEGSDIDTRRRAACDLVRGLCKFFEGPVTGIFSGYVNSMLQEYAKNPSVNWKHKDAAIYLVTSLASKAQTQKHGITQANELVNLTEFFVNHILPDLKSANVNEFPVLKADGIKYIMIFRNQVPKEHLLVSIPLLINHLQAESIVVHTYAAHALERLFTMRGPNNATLFTAAEIAPFVEILLTNLFKALTLPGSSENEYIMKAIMRSFSLLQEAIIPYIPTLITQLTQKLLAVSKNPSKPHFNHYMFEAICLSIRITCKANPAAVVNFEEALFLVFTEILQNDVQEFIPYVFQVMSLLLETHKNDIPSSYMALFPHLLQPVLWERTGNIPALVRLLQAFLERGSNTIASAAADKIPGLLGVFQKLIASKANDHQGFYLLNSIIEHMPPESVDQYRKQIFILLFQRLQNSKTTKFIKSFLVFINLYCIKYGALALQEIFDGIQPKMFGMVLEKIIIPEIQKVSGNVEKKICAVGITKLLTECPPMMDTEYTKLWTPLLQSLIGLFELPEDDTIPDEEHFIDIEDTPGYQTAFSQLAFAGKKEHDPVGQMVNNPKIHLAQSLHKLSTACPGRVPSMVSTSLNAEALQYLQGYLQAASVTLL

SEQ ID NO: 468 - DNA, 3579 bp, Homo sapiens
tcaggctcgctgtcgcgccattttgccggggtttgaatgtgaggcggagcggcggcaggagcgggtagtgccagctacggtccgcggctggggttccctcctccgtttctgtatccccacgagatcctatagcaatggaactcagcgatgcaaatctgcaaacactaacagaatatttaaagaaaacacttgatcctgatcctgccatccgacgtccagctgagaaatttcttgaatctgttgaaggaaatcagaattatccactgttgcttttgacattactggagaagtcccaggataatgttatcaaagtatgtgcttcagtaacattcaaaaactatattaaaaggaactggagaattgttgaagatgaaccaaacaaaatttgtgaagccgatcgagtggccattaaagccaacatagtgcacttgatgcttagcagcccagagcaaattcagaagcagttaagtgatgcaattagcattattggcagagaagattttccacagaaatggcctgacttgctgacagaaatggtgaatcgctttcagagtggagatttccatgttattaatggagtcctccgtacagcacattcattatttaaaagataccgtcatgaatttaagtcaaacgagttatggactgaaattaagcttgttctggatgcctttgctttgcctttgactaatctttttaaggccactattgaactctgcagtacccatgcaaatgatgcctctgccctgaggattctgttttcttccctgatcctgatctcaaaattgttctatagtttaaactttcaggatctccctgaattttttgaagataatatggaaacttggatgaataattttcatactctcttaacattggataataagcttttacaaactgatgatgaagaggaagccggcttattggagctcttaaaatcccagatttgtgataatgccgcactctatgcacaaaagtacgatgaagaattccagcgatacctgcctcgttttgttacagccatctggaatttactagttacaacgggtcaagaggttaaatatgatttgttggtaagtaatgcaattcaatttctggcttcagtttgtgagagacctcattataagaatctatttgaggaccagaacacgctgacaagtatctgtgaaaaggttattgtgcctaacatggaatttagagctgctgatgaagaagcatttgaagataattctgaggagtacataaggagagatttggaaggatctgatattgatactagacgcagggctgcttgtgatctggtacgaggattatgcaagttttttgagggacctgtgacaggaatcttctctggttatgttaattccatgctgcaggaatacgcaaaaaatccatctgtcaactggaaacacaaagatgcagccatctacctagtgacatctttggcatcaaaagcccaaacacagaagcatggaattacacaagcaaatgaacttgtaaacctaactgagttctttgtgaatcacatcctccctgatttaaaatcagctaatgtgaatgaatttcctgtccttaaagctgacggtatcaaatatattatgatttttagaaatcaagtgccaaaagaacatcttttagtctcgattcctctcttgattaatcatcttcaagctgaaagtattgttgttcatacttacgcagctcatgctcttgaacggctctttactatgcgagggcctaacaatgccactctctttacagctgcagaaatcgcaccgtttgttgagattctgctaacaaaccttttcaaagctctcacacttcctggctcttcagaaaatgaatatattatgaaagctatcatgagaagtttttctctcctacaagaagccataatcccctacatccctactctcatcactcagcttacacagaagctattagctgttagtaagaacccaagcaaacctcactttaatcactacatgtttgaagcaatatgtttatccataagaataacttgcaaagctaaccctgctgctgttgtaaattttgaggaggctttgtttttggtgtttactgaaatcttacaaaatgatgtgcaagaatttattccatacgtctttcaagtgatgtctttgcttctggaaacacacaaaaatgacatcccgtcttcctatatggccttatttcctcatctccttcagccagtgctttgggaaagaacaggaaatattcctgctctagtgaggcttcttcaagcattcttagaacgcggttcaaacacaatagcaagtgctgcagctgacaaaattcctgggttactaggtgtctttcagaagctgattgcatccaaagcaaatgaccaccaaggtttttatcttctaaacagtataatagagcacatgcctcctgaatcagttgaccaatataggaaacaaatcttcattctgctattccagagacttcagaattccaaaacaaccaagtttatcaagagttttttagtctttattaatttgtattgcataaaatatggggcactagcactacaagaaatatttgatggtatacaaccaaaaatgtttggaatggttttggaaaaaattattattcctgaaattcagaaggtatctggaaatgtagagaaaaagatctgtgcggttggcataaccaaattactaacagaatgtcccccaatgatggacactgagtataccaaactgtggactccattattacagtctttgattggtctttttgagttacccgaagatgataccattcctgatgaggaacattttattgacatagaagatacaccaggatatcagactgccttctcacagttggcatttgctgggaaaaaagagcatgatcctgtaggtcaaatggtgaataaccccaaaattcacctggcacagtcacttcacaagttgtctaccgcctgtccaggaagggttccatcaatggtgagcaccagcctgaatgcagaagcgctccagtatctccaagggtaccttcaggcagccagtgtgacactgctttaaactgcatttttctaatgggctaaacccagatggtttcctaggaaatcacaggcttctgagcacagctgcattaaaacaaaggaagttctccttttgaacttgtcacgaattccatcttgtaaaggatattaaatgttgctttaacctgaaccttgagcaaattagttggtttgtgtgatcatacagttatgtgggtggcttctagtttgcaacttcaagggacaagtattaatagttcagtgtatggcgttggtttgtgttgagcgtttgcacggtttggataatcttaaattttgacggacactgtggagactttctgttactaaatccttttgttttgaagctgttgctatttgtatttctcttgtcctttatattttttgtctgtttatttacgcttttattggaaatgtgaataagtaaagaattacttgtgttacttgccaagcagtgcacatttcatagtttcaaatctgtaatcagcaataaaaatcctaaaatatgtacctaaaaaaaaaaaaaaaaaaaa

SEQ ID NO: 469 - protein, 234 aa, Homo sapiens
MSCINLPTVLPGSPSKTRGQIQVILGPMFSGKSTELMRRVRRFQIAQYKCLVIKYAKDTRYSSSFCTHDRNTMEALPACLLRDVAQEALGVAVIGIDEGQFFPDIMEFCEAMANAGKTVIVAALDGTFQRKPFGAILNLVPLAESVVKLTAVCMECFREAAYTKRLGTEKEVEVIGGADKYHSVCRLCYFKKASGQPAGPDNKENCPVPGKPGEAVAARKLFAPQQILQCSPAN

SEQ ID NO: 470 - DNA, 1421 bp, Homo sapiens
acttactgcgggacggccttggagagtactcgggttcgtgaacttcccggaggcgcaatgagctgcattaacctgcccactgtgctgcccggctcccccagcaagacccgggggcagatccaggtgattctcgggccgatgttctcaggaaaaagcacagagttgatgagacgcgtccgtcgcttccagattgctcagtacaagtgcctggtgatcaagtatgccaaagacactcgctacagcagcagcttctgcacacatgaccggaacaccatggaggcgctgcccgcctgcctgctccgagacgtggcccaggaggccctgggcgtggctgtcataggcatcgacgaggggcagtttttccctgacatcatggagttctgcgaggccatggccaacgccgggaagaccgtaattgtggctgcactggatgggaccttccagaggaagccatttggggccatcctgaacctggtgccgctggccgagagcgtggtgaagctgacggcggtgtgcatggagtgcttccgggaagccgcctataccaagaggctcggcacagagaaggaggtcgaggtgattgggggagcagacaagtaccactccgtgtgtcggctctgctacttcaagaaggcctcaggccagcctgccgggccggacaacaaagagaactgcccagtgccaggaaagccaggggaagccgtggctgccaggaagctctttgccccacagcagattctgcaatgcagccctgccaactgagggacctgcaagggccgcccgctcccttcctgccactgccgcctactggacgctgccctgcatgctgcccagccactccaggaggaagtcgggaggcgtggagggtgaccacaccttggccttctgggaactctcctttgtgtggctgccccacctgccgcatgctccctcctctcctacccactggtctgcttaaagcttccctctcagctgctgggacgatcgcccaggctggagctggccccgcttggtggcctgggatctggcacactccctctccttggggtgagggacagagccccacgctgttgacatcagcctgcttcttcccctctgcggctttcactgctgagtttctgttctccctgggaagcctgtgccagcacctttgagccttggcccacactgaggcttaggcctctctgcctgggatgggctcccaccctcccctgaggatggcctggattcacgccctcttgtttccttttgggctcaaagcccttcctacctctggtgatggtttccacaggaacaacagcatctttcaccaagatgggtggcaccaaccttgctgggacttggatcccaggggcttatctcttcaagtgtggagagggcagggtccacgcctctgctgtagcttatgaaattaactaatt

SEQ ID NO: 471 - protein, 792 aa, Homo sapiens
MHVIKRDGRQERVMFDKITSRIQKLCYGLNMDFVDPAQITMKVIQGLYSGVTTVELDTLAAETAATLTTKHPDYAILAARIAVSNLHKETKKVFSDVMEDLYNYINPHNGKHSPMVAKSTLDIVLANKDRLNSAIIYDRDFSYNYFGFKTLERSYLLKINGKVAERPQHMLMRVSVGIHKEDIDAAIETYNLLSERWFTHASPTLFNAGTNRPQLSSCFLLSMKDDSIEGIYDTLKQCALISKSAGGIGVAVSCIRATGSYIAGTNGNSNGLVPMLRVYNNTARYVDQGGNKRPGAFAIYLEPWHLDIFEFLDLKKNTGKEEQRARDLFFALWIPDLFMKRVETNQDWSLMCPNECPGLDEVWGEEFEKLYASYEKQGRVRKVVKAQQLWYAIIESQTETGTPYMLYKDSCNRKSNQQNLGTIKCSNLCTEIVEYTSKDEVAVCNLASLALNMYVTSEHTYDFKKLAEVTKVVVRNLNKIIDINYYPVPEACLSNKRHRPIGIGVQGLADAFILMRYPFESAEAQLLNKQIFETIYYGALEASCDLAKEQGPYETYEGSPVSKGILQYDMWNVTPTDLWDWKVLKEKIAKYGIRNSLLIAPMPTASTAQILGNNESIEPYTSNIYTRRVLSGEFQIVNPHLLKDLTERGLWHEEMKNQIIACNGSIQSIPEIPDDLKQLYKTVWEISQKTVLKMAAERGAFIDQSQSLNIHIAEPNYGKLTSMHFYGWKQGLKTGMYYLRTRPAANPIQFTLNKEKLKDKEKVSKEEEEKERNTAAMVCSLENRDECLMCGS

SEQ ID NO: 472 - DNA, 3117 bp, Homo sapiens
attcgaaccccgtcgcgcccctttgtgcgtcacgggtggcgggcgcgggaaggggatttggattgttgcgcctctgctctgaagaaagtgctgtctggctccaactccagttctttcccctgagcagcgcctggaacctaacccttcccactctgtcaccttctcgatcccgccggcgctttagagccgcagtccagtcttggatccttcagagcctcagccactagctgcgatgcatgtgatcaagcgagatggccgccaagaacgagtcatgtttgacaaaattacatctcgaatccagaagctttgttatggactcaatatggattttgttgatcctgctcagatcaccatgaaagtaatccaaggcttgtacagtggggtcaccacagtggaactagatactttggctgctgaaacagctgcaaccttgactactaagcaccctgactatgctatcctggcagccaggatcgctgtctctaacttgcacaaagaaacaaagaaagtgttcagtgatgtgatggaagacctctataactacataaatccacataatggcaaacactctcccatggtggccaagtcaacattggatattgttctggccaataaagatcgcctgaattctgctattatctatgaccgagatttctcttacaattacttcggctttaagacgctagagcggtcttatttgttgaagatcaatggaaaagtggctgaaagaccacaacatatgttgatgagagtatctgttgggatccacaaagaagacattgatgcagcaattgaaacatataatcttctttctgagaggtggtttactcatgcttcgcccactctcttcaatgctggtaccaaccgcccacaactttctagctgttttcttctgagtatgaaagatgacagcattgaaggcatttatgacactctaaagcaatgtgcattgatttctaagtctgctggaggaattggtgttgctgtgagttgtattcgggctactggcagctacattgctgggactaatggcaattccaatggccttgtaccgatgctgagagtatataacaacacagctagatatgtggatcaaggtgggaacaagcgtcctggggcatttgctatttacctggagccttggcatttagacatctttgaattccttgatttaaagaagaacacaggaaaggaagagcagcgtgccagagatcttttctttgctctttggattccggatctcttcatgaaacgagtggagactaatcaggactggtctttgatgtgtccaaatgagtgtcctggtctggatgaggtttggggagaggaatttgagaaactatatgcaagttatgagaaacaaggtcgtgtccgcaaagttgtaaaagctcagcagctttggtatgccatcattgagtctcagacggaaacaggcaccccgtatatgctctacaaagattcctgtaatcgaaagagcaaccagcagaacctgggaaccatcaaatgcagcaacctgtgcacagaaatagtggagtacaccagcaaagatgaggttgctgtttgtaatttggcttccctggccctgaatatgtatgtcacatcagaacacacatacgactttaagaagttggctgaagtcactaaagtcgttgtccgaaacttgaataaaattattgatataaactactatcctgtaccagaggcatgcctatcaaataaacgccatcgccccattggaattggggtacaaggtctggcagatgcttttatcctgatgagatacccttttgagagtgcagaagcccagttactgaataagcagatctttgaaactatttattatggtgctctggaagccagctgtgaccttgccaaggagcagggcccatacgaaacctatgagggctctccagttagcaaaggaattcttcagtatgatatgtggaatgttactcctacagacctatgggactggaaggttctcaaggagaagattgcaaagtatggtataagaaacagtttacttattgccccgatgcctacagcttccactgctcagatcctggggaataatgagtccattgaaccttacaccagcaacatctatactcgcagagtcttgtcaggagaatttcagattgtaaatcctcacttattgaaagatcttaccgagcggggcctatggcatgaagagatgaaaaaccagattattgcatgcaatggctctattcagagcataccagaaattcctgatgacctgaagcaactttataaaactgtgtgggaaatctctcagaaaactgttctcaagatggcagctgagagaggtgctttcattgatcaaagccaatctttgaacatccacattgctgagcctaactatggcaaactcactagtatgcacttctacggctggaagcagggtttgaagactgggatgtattatttaaggacaagaccagcagctaatccaatccagttcactctaaataaggagaagctaaaagataaagaaaaggtatcaaaagaggaagaagagaaggagaggaacacagcagccatggtgtgctctttggagaatagagatgaatgtctgatgtgtggatcctgaggaaagacttggaagagaccagcatgtcttcagtagccaaactacttcttgagcatagataggtatagtgggtttgcttgaggtggtaaggctttgctggaccctgttgcaggcaaaaggagtaattgatttaaagtactgttaatgatgttaatgatttttttttaaactcatatattgggattttcaccaaaataatgcttttgaaaaaaagaaaaaaaaaacggatatattgagaatcaaagtagaagttttaggaatgcaaaataagtcatcttgcatacagggagtggttaagtaaggtttcatcacccatttagcatgcttttctgaagacttcagttttgttaaggagatttagttttactgctttgactggtgggtctctagaagcaaaactgagtgataactcatgagaagtactgataggacctttatctggatatggtcctataggttattctgaaataaagataaacatttctaagtgaaaaaaaaaaaaaaaa

SEQ ID NO: 473 - protein, 674 aa, Homo sapiens
MNSGAMRIHSKGHFQGGIQVKNEKNRPSLKSLKTDNRPEKSKCKPLWGKVFYLDLPSVTISEKLQKDIKDLGGRVEEFLSKDISYLISNKKEAKFAQTLGRISPVPSPESAYTAETTSPHPSHDGSSFKSPDTVCLSRGKLLVEKAIKDHDFIPSNSILSNALSWGVKILHIDDIRYYIEQKKKELYLLKKSSTSVRDGGKRVGSGAQKTRTGRLKKPFVKVEDMSQLYRPFYLQLTNMPFINYSIQKPCSPFDVDKPSSMQKQTQVKLRIQTDGDKYGGTSIQLQLKEKKKKGYCECCLQKYEDLETHLLSEQHRNFAQSNQYQVVDDIVSKLVFDFVEYEKDTPKKKRIKYSVGSLSPVSASVLKKTEQKEKVELQHISQKDCQEDDTTVKEQNFLYKETQETEKKLLFISEPIPHPSNELRGLNEKMSNKCSMLSTAEDDIRQNFTQLPLHKNKQECILDISEHTLSENDLEELRVDHYKCNIQASVHVSDFSTDNSGSQPKQKSDTVLFPAKDLKEKDLHSIFTHDSGLITINSSQEHLTVQAKAPFHTPPEEPNECDFKNMDSLPSGKIHRKVKIILGRNRKENLEPNAEFDKRTEFITQEENRICSSPVQSLLDLFQTSEEKSEFLGFTSYTEKSGICNVLDIWEEENSDNLLTAFFSSPSTSTFTGF

SEQ ID NO: 474 - DNA, 3729 bp, Homo sapiens
ggggcacggcgcgtggcgtgagacggggcggggcgcgcgtatcggcgccgcggccgcgtgacgcgttttcaaatcttcaaccgccgcagcccactcgtttgtgctttgcgccttcctcctccgcgccttggagccggatccggccccggaaacccgacctgcagacgcggtacctctactgcgtagaggccgtagctggcggaaggagagaggcggccgtcctgtcaacaggccgggggaagccgtgctttcgcggctgcccggtgcgacactttctccggacccagcatgtaggtgccgggcgactgccatgaactccggagccatgaggatccacagtaaaggacatttccagggtggaatccaagtcaaaaatgaaaaaaacagaccatctctgaaatctctgaaaactgataacaggccagaaaaatccaaatgtaagccactttggggaaaagtattttaccttgacttaccttctgtcaccatatctgaaaaacttcaaaaggacattaaggatctgggagggcgagttgaagaatttctcagcaaagatatcagttatcttatttcaaataagaaggaagctaaatttgcacaaaccttgggtcgaatttctcctgtaccaagtccagaatctgcatatactgcagaaaccacttcacctcatcccagccatgatggaagttcatttaagtcaccagacacagtgtgtttaagcagaggaaaattattagttgaaaaagctatcaaggaccatgattttattccttcaaatagtatattatcaaatgccttgtcatggggagtaaaaattcttcatattgatgacattagatactacattgaacaaaagaaaaaagagttgtatttactcaagaaatcaagtacttcagtaagagatgggggcaaaagagttggtagtggtgcacaaaaaacaagaacaggaagactcaaaaagccttttgtaaaggtggaagatatgagccaactttataggccattttatcttcagctgaccaatatgccttttataaattattctattcagaagccctgcagtccatttgatgtagacaagccatctagtatgcaaaagcaaactcaggttaaactaagaatccaaacagatggcgataagtatggtggaacctcaattcaactccagttgaaagagaagaagaaaaaaggatattgtgaatgttgcttgcagaaatatgaagatctagaaactcaccttctaagtgagcaacacagaaactttgcacagagtaaccagtatcaagttgttgatgatattgtatctaagttagtttttgactttgtggaatatgaaaaggacacacctaaaaagaaaagaataaaatacagtgttggatccctttctcctgtttctgcaagtgtcctgaaaaagactgaacaaaaggaaaaagtggaattgcaacatatttctcagaaagattgccaggaagatgatacaacagtgaaggagcagaatttcctgtataaagagacccaggaaactgaaaaaaagctcctgtttatttcagagcccatcccccacccttcaaatgaattgagagggcttaatgagaaaatgagtaataaatgttccatgttaagtacagctgaagatgacataagacagaattttacacagctacctctacataaaaacaaacaggaatgcattcttgacatttccgaacacacattaagtgaaaatgacttagaagaactaagggtagatcactataaatgtaacatacaggcatctgtacatgtttctgatttcagtacagataatagtggatctcaaccaaaacagaagtcagatactgtgctttttccagcaaaggatctcaaggaaaaggaccttcattcaatatttactcatgattctggtctgataacaataaacagttcacaagagcacctaactgttcaggcaaaggctccattccatactcctcctgaggaacccaatgaatgtgacttcaagaatatggatagtttaccttctggtaaaatacatcgaaaagtgaaaataatattaggacgaaatagaaaagaaaatctggaaccaaatgctgaatttgataaaagaactgaatttattacacaagaagaaaacagaatttgtagttcaccggtacagtctttactagacttgtttcagactagtgaagagaaatcagaatttttgggtttcacaagctacacagaaaagagtggtatatgcaatgttttagatatttgggaagaggaaaattcagataatctgttaacagcgtttttctcgtccccttcaacttctacatttactggcttttagaatttaaaaaatgcatacttttcagaagtgataaggatcatattcttgaaatttttataaatatgtatggaaattcttaggatttttttaccagctttgtttacagacccaaatgtaaatattaaaaataaatatttgcaattttctacagaattgaatacctgttaaagaaaaattacagaataaacttgtgactggtcttgttttacattatatatatgttcgtaattgtttcctgagaattacaatgaataataatttgctttgtcactgaaaaccaccagtgaagtgcaatttggggaatatcaaacttagcattatacatttggatattctagttgtattgtaaattttaaaagattatcaggataacatgaccttgccttgaaaaacctaaatttcatacagaaaggaaaaatacatttctatgcttgaattctggaaatcatcagaaatattgacacttgagggtcactggtggaccatgctagtattttggtgctgagtaattagattatgtataggggtaactggaagccatgaaggaaggacttaaccaggctaccaagtggaatataatttatctgctatttttaattacttaccttgtaaataactttaataatattcaaaagttgactctcctgtggctcatgccacaggatcccagcactttgggaggccgaggcaggctgatcacgaggtcagaagatcaagaccatcctggccaacatggtgaaaccttgtctactaaaaatacaaaaaattagctgggcatggcggcatgcgcctgtagtcccagctactccctccagaggctgagaattgcttgaacctgggaagtgcaggttgcagtgagccaagattgtgccactgtattccagactgggtgacagagtgagactccatctcaaaaaaaaaaaagttgactctaccccctaatttggtaggagatgaaggagaaaaggatggcattgaattatagatacagttttgggatatatacaaggattgccttgatctggcacttactgatacaagcatttggagaagagaaaattcaaatataagaaatttcaatttgaatctgtggatataaggcatttgcctttgagtatgttcttgtaggagtaagactaccaccagtgacattcaattggttctattgcatagtacatgaatctattgtcactaaaaattaggttactaatcttaatttttttgaaatatatgattctcagtacaggactaattcatatgcttttcctgcatacattattttgatcatttggataacatcaatgaacactggctttttaacacctttgtttttcataccagtacctgaagtaggctcaataaaagagtctttacagtgaaaaaaaaaaaaaaaa

SEQ ID NO: 475 - protein, 255 aa, Homo sapiens
MVKLTAELIEQAAQYTNAVRDRELDLRGYKIPVIENLGATLDQFDAIDFSDNEIRKLDGFPLLRRLKTLLVNNNRICRIGEGLDQALPCLTELILTNNSLVELGDLDPLASLKSLTYLSILRNPVTNKKHYRLYVIYKVPQVRVLDFQKVKLKERQEAEKMFKGKRGAQLAKDIARRSKTFNPGAGLPTDKKRGGPSPGDVEAIKNAIANASTLAEVERLKGLLQSGQIPGRERRSGPTDDGEEEMEEDTVTNGS

SEQ ID NO: 476 - DNA, 1054 bp, Homo sapiens
gaattccgcgggaggccacgggctttccacagcgcgggggaacgggaggctgcaggatggtcaagctgacggcggagctgatcgagcaggcggcgcagtacaccaacgcggtgcgcgaccgggagctggacctccgggggtataaaattcccgtcattgaaaatctaggtgctacgttagaccagtttgatgctattgatttttctgacaatgagatcaggaaactggatggttttcctttgttgagaagactgaaaacattgttagtgaacaacaacagaatatgccgtataggtgagggacttgatcaggctctgccctgtctgacagaactcattctcaccaataatagtctcgtggaactgggtgatctggaccctctggcatctctcaaatcgctgacttacctaagtatcctaagaaatccggtaaccaataagaagcattacagattgtatgtgatttataaagttccgcaagtcagagtactggatttccagaaagtgaaactaaaagagcgtcaggaagcagagaaaatgttcaagggcaaacggggtgcacagcttgcaaaggatattgccaggagaagcaaaacttttaatccaggtgctggtttgccaactgacaaaaagagaggtgggccatctccaggggatgtagaagcaatcaagaatgccatagcaaatgcttcaactctggctgaagtggagaggctgaaggggttgctgcagtctggtcagatccctggcagagaacgcagatcagggcccactgatgatggtgaagaagagatggaagaagacacagtcacaaacgggtcctgagcagtgaggcagatgtataataataggccctcttggaacaagtcttgcttttcgaacatggtataatagccttgtttgtgttagcaaagtggaatctatcagcattgttgaaatgcttaagactgctgctgataattttgtaatataagttttgaaatctaaatgtcaattttctacaaattataaaaataaactccactctctatgctaaaaaaaaaaaaaaggaattc

SEQ ID NO: 477 - protein, 241 aa, Homo sapiens
MRHQQTERQDPSQPLSRQHGTYRQIFHPEQLITGKEDAANNYAWGHYTIGKEFIDLLLDRIRKLADQCTGLQGFLVFHSLGRGTGSDVTSFLMEWLSVNYGKKSKLGFSIYPAPQVSTAMVQPYNSILTTHTTLEHSDCAFMVDNKAIYDICHRNLDIERPTYTNLNRLISQIVSSITASLRFDGALNVDLTEFQTNLVSYLTSTSPWPPMHQSSLQKKYTTSSCRWQRLPMPALSLPTRW

SEQ ID NO: 478 - DNA, 1380 bp, Homo sapiens
gtctctgcccatccgcgcacccgggcttcggctggagagggccagctcgcttcaggaggccgaaccccgttcccaccaaccctctcagctcagacgcggggtgctgagtcacggggggggggtggttctgtggatagttggaatgcatacacagaggaaagggggatgcggcaccagcagacagagagacaagaccccagccagcccctgtccaggcagcatggcacataccgccagatcttccatccagagcagctcatcacaggcaaggaagatgctgccaataactatgcctggggccactacaccattgggaaggagttcatcgacctgctactggaccggattcggaagctggctgaccagtgcacaggacttcagggcttcctggtgttccacagccttggtcggggcactggctctgacgtcacctcattcctgatggagtggctttctgttaactatggcaagaaatccaagctgggattctccatctacccagccccccaggtgtctacagccatggtccagccctacaactctatcctgaccacccacaccaccctggagcactcagactgtgccttcatggtggacaacaaagcaatctatgacatctgccaccgcaacctagacattgagcgcccaacctacaccaacctcaatcgcctcattagccaaattgtctcctccatcacagcttctctgcgctttgacggggccctcaatgtggacctgacagagttccagaccaacctggtgtcctacctcacatccacttccccctggccacctatgcaccagtcatctctgcagaaaaagtataccacgagcagctgtcggtggcagagattaccaatgcctgctttgagcctgccaaccagatggtgaagtgtgatccccggcacggcaagtacatggcctgctgcctgctataccatggagatgtggtgcccaaggatgtcaacgctgccattgctgccatcaagaccaagtgcagcattcagtttgtggactggtgccccacaggctttaaggttgatatcaatcaccagcctcccactgtggtgcctgggagtgacctggtaaagtgcaacgtgccatgtgcatgctgagcaacatgacagccatcactatggcctgggcccgcctggaccacaagtttgacctgatgtatgccaagagggcgtttgggcactgatatgtgggtgagggcatggaggagggtgagttctccaaggcccatgaggatatgactgccctggagaaggattacaaggaggtgggcatggatagtgtggagtgtggggaagaaaagataggggggatgaatactaggggaatactgtgtgtctgtcctacataaagtgctgtggcctt

SEQ ID NO: 479 - protein, 175 aa, Homo sapiens
MTDCEFGYIYRLAQDYLQCVLQIPQPGSGPSKTSRVLQNVAFSVQKEVEKNLKSCLDNVNVVSVDTARTLFNQVMEKEFEDGIINWGRIVTIFAFEGILIKKLLRQQIAPDVDTYKEISYFVAEFIMNNTGEWIRQNGGWENGFVKKFEPKSGWMTFLEVTGKICEMLSLLKQYC

SEQ ID NO: 480 - DNA, 885 bp, Homo sapiens
agcctacgcacgaaagtgactagggaggaaggatattataaagtgatgcaaacagaaattccaccagcctccatgtatcatcatgtgtcataactcagtcaagctcagtgagcattctcagcacattgcctcaacagcttcaaggtgagccagctcaagactttgctctccaccaggcagaagatgacagactgtgaatttggatatatttacaggctggctcaggactatctgcagtgcgtcctacagataccacaacctggatcaggtccaagcaaaacgtccagagtgctacaaaatgttgcgttctcagtccaaaaagaagtggaaaagaatctgaagtcatgcttggacaatgttaatgttgtgtccgtagacactgccagaacactattcaaccaagtgatggaaaaggagtttgaagacggcatcattaactggggaagaattgtaaccatatttgcatttgaaggtattctcatcaagaaacttctacgacagcaaattgccccggatgtggatacctataaggagatttcatattttgttgcggagttcataatgaataacacaggagaatggataaggcaaaacggaggctgggaaaatggctttgtaaagaagtttgaacctaaatctggctggatgacttttctagaagttacaggaaagatctgtgaaatgctatctctcctgaagcaatactgttgaccagaaaggacactccatattgtgaaaccggcctaatttttctgactgatatggaaacgattgccaacacatacttctacttttaaataaacaactttgatgatgtaacttgaccttccagagttatggaaattttgtccccatgtaatgaataaattgtatgtatttttctct

SEQ ID NO: 481 - protein, 104 aa, Homo sapiens
MSHTILLVQPTKRPEGRTYADYESVNECMEGVCKMYEEHLKRMNPNSPSITYDISQLFDFIDDLADLSCLVYRADTQTYQPYNKDWIKEKIYVLLRRQAQQAGK

SEQ ID NO: 482 - DNA, 815 bp, Homo sapiens
gcggcgttgtagttaagctcgtgtaacggcggcggtgtcggcagctgctgtagcgaagagagtttggcgcgatgtctcacaccattttgctggtacagcctaccaagaggccagaaggcagaacttatgctgactacgaatctgtgaatgaatgcatggaaggtgtttgtaaaatgtatgaagaacatctgaaaagaatgaatcccaacagtccctctatcacatatgacatcagtcagttgtttgatttcatcgatgatctggcagacctcagctgcctggtttaccgagctgatacccagacataccagccttataacaaagactggattaaagagaagatctacgtgctccttcgtcggcaggcccaacaggctgggaaataattgtgttggaagcactgggggggttggggtgggcttggaacacaggtgtgtacagcgtgctgtagtggaagttttgtatcatagtaatcctgtttccactttgttatactctagccaagattgactgtattagatgaaatgtgaggatcttgttcaatcggaaacccccgttacctcctctttttctttctctttcttttttttttttttacttaaacatttttatgatgatttagatggaagttgttcttcgtcacttaatgttggttccagtccttcaactgttcatatctactttataacattcacatactaacccttcttcaagatggggtggggggtggaaatgcagtttagccatgtcctcaagataaagtcttggtaaaaataaataaatgtcctttagttataaaaaaaaaaaaaaaaaaa

SEQ ID NO: 483 - protein, 857 aa, Homo sapiens
MESEDLSGRELTIDSIMNKVRDIKNKFKNEDLTDELSLNKISADTTDNSGTVNQIMMMANNPEDWLSLLLKLEKNSVPLSDALLNKLIGRYSQAIEALPPDKYGQNESFARIQVRFAELKAIQEPDDARDYFQMARANCKKFAFVHISFAQFELSQGNVKKSKQLLQKAVERGAVPLEMLEIALRNLNLQKKQLLSEEEKKNLSASTVLTAQESFSGSLGHLQNRNNSCDSRGQTTKARFLYGENMPPQDAEIGYRNSLRQTNKTKQSCPFGRVPVNLLNSPDCDVKTDDSVVPCFMKRQTSRSECRDLVVPGSKPSGNDSCELRNLKSVQNSHFKEPLVSDEKSSELIITDSITLKNKTESSLLAKLEETKEYQEPEVPESNQKQWQSKRKSECINQNPAASSNHWQIPELARKVNTEQKHTTFEQPVFSVSKQSPPISTSKWFDPKSICKTPSSNTLDDYMSCFRTPVVKNDFPPACQLSTPYGQPACFQQQQHQILATPLQNLQVLASSSANECISVKGRIYSILKQIGSGGSSKVFQVLNEKKQIYAIKYVNLEEADNQTLDSYRNEIAYLNKLQQHSDKIIRLYDYEITDQYIYMVMECGNIDLNSWLKKKKSIDPWERKSYWKNMLEAVHTIHQHGIVHSDLKPANFLIVDGMLKLIDFGIANQMQPDTTSVVKDSQVGTVNYMPPEAIKDMSSSRENGKSKSKISPKSDVWSLGCILYYMTYGKTPFQQIINQISKLHAIIDPNHEIEFPDIPEKDLQDVLKCCLKRDPKQRISIPELLAHPYVQIQTHPVNQMAKGTTEEMKYVLGQLVGLNSPNSILKAAKTLYEHYSGGESHNSSSSKTFEKKRGKK

SEQ ID NO: 484 - DNA, 2984 bp, Homo sapiens
ggaaattcaaacgtgtttgcggaaaggagtttgggttccatcttttcatttccccagcgcagctttctgtagaaatggaatccgaggatttaagtggcagagaattgacaattgattccataatgaacaaagtgagagacattaaaaataagtttaaaaatgaagaccttactgatgaactaagcttgaataaaatttctgctgatactacagataactcgggaactgttaaccaaattatgatgatggcaaacaacccagaggactggttgagtttgttgctcaaactagagaaaaacagtgttccgctaagtgatgctcttttaaataaattgattggtcgttacagtcaagcaattgaagcgcttcccccagataaatatggccaaaatgagagttttgctagaattcaagtgagatttgctgaattaaaagctattcaagagccagatgatgcacgtgactactttcaaatggccagagcaaactgcaagaaatttgcttttgttcatatatcttttgcacaatttgaactgtcacaaggtaatgtcaaaaaaagtaaacaacttcttcaaaaagctgtagaacgtggagcagtaccactagaaatgctggaaattgccctgcggaatttaaacctccaaaaaaagcagctgctttcagaggaggaaaagaagaatttatcagcatctacggtattaactgcccaagaatcattttccggttcacttgggcatttacagaataggaacaacagttgtgattccagaggacagactactaaagccaggtttttatatggagagaacatgccaccacaagatgcagaaataggttaccggaattcattgagacaaactaacaaaactaaacagtcatgcccatttggaagagtcccagttaaccttctaaatagcccagattgtgatgtgaagacagatgattcagttgtaccttgttttatgaaaagacaaacctctagatcagaatgccgagatttggttgtgcctggatctaaaccaagtggaaatgattcctgtgaattaagaaatttaaagtctgttcaaaatagtcatttcaaggaacctctggtgtcagatgaaaagagttctgaacttattattactgattcaataaccctgaagaataaaacggaatcaagtcttctagctaaattagaagaaactaaagagtatcaagaaccagaggttccagagagtaaccagaaacagtggcaatctaagagaaagtcagagtgtattaaccagaatcctgctgcatcttcaaatcactggcagattccggagttagcccgaaaagttaatacagagcagaaacataccacttttgagcaacctgtcttttcagtttcaaaacagtcaccaccaatatcaacatctaaatggtttgacccaaaatctatttgtaagacaccaagcagcaataccttggatgattacatgagctgttttagaactccagttgtaaagaatgactttccacctgcttgtcagttgtcaacaccttatggccaacctgcctgtttccagcagcaacagcatcaaatacttgccactccacttcaaaatttacaggttttagcatcttcttcagcaaatgaatgcatttcggttaaaggaagaatttattccattttaaagcagataggaagtggaggttcaagcaaggtatttcaggtgttaaatgaaaagaaacagatatatgctataaaatatgtgaacttagaagaagcagataaccaaactcttgatagttaccggaacgaaatagcttatttgaataaactacaacaacacagtgataagatcatccgactttatgattatgaaatcacggaccagtacatctacatggtaatggagtgtggaaatattgatcttaatagttggcttaaaaagaaaaaatccattgatccatgggaacgcaagagttactggaaaaatatgttagaggcagttcacacaatccatcaacatggcattgttcacagtgatcttaaaccagctaactttctgatagttgatggaatgctaaagctaattgattttgggattgcaaaccaaatgcaaccagatacaacaagtgttgttaaagattctcaggttggcacagttaattatatgccaccagaagcaatcaaagatatgtcttcctccagagagaatgggaaatctaagtcaaagataagccccaaaagtgatgtttggtccttaggatgtattttgtactatatgacttacgggaaaacaccatttcagcagataattaatcagatttctaaattacatgccataattgatcctaatcatgaaattgaatttcccgatattccagagaaagatcttcaagatgtgttaaagtgttgtttaaaaagggacccaaaacagaggatatccattcctgagctcctggctcatccctatgttcaaattcaaactcatccagttaaccaaatggccaagggaaccactgaagaaatgaaatatgttctgggccaacttgttggtctgaattctcctaactccattttgaaagctgctaaaactttatatgaacactatagtggtggtgaaagtcataattcttcatcctccaagacttttgaaaaaaaaaggggaaaaaaatgatttgcagttattcgtaatgtcaaataccacctataaaatatattggactgttatactcttgaatccctgtggaaatctacatttgaagacaacatcactctgaagtgttatcagcaaaaaaaattcagtagattatctttaaaagaaaactgtaaaaatagcaaccacttatggtactgtatatattgtagacttgttttctctgttttatgctcttgtgtaatctacttgacatcattttactcttggaatagtgggtggatagcaagtatattctaaaaaactttgtaaataaagttttgtggctaaaatgacactaaaaaaaaaaaaaaaaaa

SEQ ID NO: 485 - protein, 725 aa, Homo sapiens
MAMDSSLQARLFPGLAIKIQRSNGLIHSANVRTVNLEKSCVSVEWAEGGATKGKEIDFDDVAAINPELLQLLPLHPKDNLPLQENVTIQKQKRRSVNSKIPAPKESLRSRSTRMSTVSELRITAQENDMEVELPAAANSRKQFSVPPAPTRPSCPAVAEIPLRMVSEEMEEQVHSIRGSSSANPVNSVRRKSCLVKEVEKMKNKREEKKAQNSEMRMKRAQEYDSSFPNWEFARMIKEFRATLECHPLTMTDPIEEHRICVCVRKRPLNKQELAKKEIDVISIPSKCLLLVHEPKLKVDLTKYLENQAFCFDFAFDETASNEVVYRFTARPLVQTIFEGGKATCFAYGQTGSGKTHTMGGDLSGKAQNASKGIYAMASRDVFLLKNQPCYRKLGLEVYVTFFEIYNGKLFDLLNKKAKLRVLEDGKQQVQVVGLQEHLVNSADDVIKMLDMGSACRTSGQTFANSNSSRSHACFQIILRAKGRMHGKFSLVDLAGNERGADTSSADRQTRMEGAEINKSLLALKECIRALGQNKAHTPFRESKLTQVLRDSFIGENSRTCMIATISPGISSCEYTLNTLRYADRVKELSPHSGPSGEQLIQMETEEMEACSNGALIPGNLSKEEEELSSQMSSFNEAMTQIRELEEKAMEELKEIIQQGPDWLELSEMTEQPDYDLETFVNKAESALAQQAKHFSALRDVIKALRLAMQLEEQASRQISSKKRPQ

SEQ ID NO: 486 - DNA, 2825 bp, Homo sapiens
gcgaaattgaggtttcttggtattgcgcgtttctcttccttgctgactctccgaatggccatggactcgtcgcttcaggcccgcctgtttcccggtctcgctatcaagatccaacgcagtaatggtttaattcacagtgccaatgtaaggactgtgaacttggagaaatcctgtgtttcagtggaatgggcagaaggaggtgccacaaagggcaaagagattgattttgatgatgtggctgcaataaacccagaactcttacagcttcttcccttacatccgaaggacaatctgcccttgcaggaaaatgtaacaatccagaaacaaaaacggagatccgtcaactccaaaattcctgctccaaaagaaagtcttcgaagccgctccactcgcatgtccactgtctcagagcttcgcatcacggctcaggagaatgacatggaggtggagctgcctgcagctgcaaactcccgcaagcagttttcagttcctcctgcccccactaggccttcctgccctgcagtggctgaaataccattgaggatggtcagcgaggagatggaagagcaagtccattccatccgtggcagctcttctgcaaaccctgtgaactcagttcggaggaaatcatgtcttgtgaaggaagtggaaaaaatgaagaacaagcgagaagagaagaaggcccagaactctgaaatgagaatgaagagagctcaggagtatgacagtagttttccaaactgggaatttgcccgaatgattaaagaatttcgggctactttggaatgtcatccacttactatgactgatcctatcgaagagcacagaatatgtgtctgtgttaggaaacgcccactgaataagcaagaattggccaagaaagaaattgatgtgatttccattcctagcaagtgtctcctcttggtacatgaacccaagttgaaagtggacttaacaaagtatctggagaaccaagcattctgctttgactttgcatttgatgaaacagcttcgaatgaagttgtctacaggttcacagcaaggccactggtacagacaatctttgaaggtggaaaagcaacttgttttgcatatggccagacaggaagtggcaagacacatactatgggcggagacctctctgggaaagcccagaatgcatccaaagggatctatgccatggcctcccgggacgtcttcctcctgaagaatcaaccctgctaccggaagttgggcctggaagtctatgtgacattcttcgagatctacaatgggaagctgtttgacctgctcaacaagaaggccaagctgcgcgtgctggaggacggcaagcaacaggtgcaagtggtggggctgcaggagcatctggttaactctgctgatgatgtcatcaagatgctcgacatgggcagcgcctgcagaacctctgggcagacatttgccaactccaattcctcccgctcccacgcgtgcttccaaattattcttcgagctaaagggagaatgcatggcaagttctctttggtagatctggcagggaatgagcgaggcgcagacacttccagtgctgaccggcagacccgcatggagggcgcagaaatcaacaagagtctcttagccctgaaggagtgcatcagggccctgggacagaacaaggctcacaccccgttccgtgagagcaagctgacacaggtgctgagggactccttcattggggagaactctaggacttgcatgattgccacgatctcaccaggcataagctcctgtgaatatactttaaacaccctgagatatgcagacagggtcaaggagctgagcccccacagtgggcccagtggagagcagttgattcaaatggaaacagaagagatggaagcctgctctaacggggcgctgattccaggcaatttatccaaggaagaggaggaactgtcttcccagatgtccagctttaacgaagccatgactcagatcagggagctggaggagaaggctatggaagagctcaaggagatcatacagcaaggaccagactggcttgagctctctgagatgaccgagcagccagactatgacctggagacctttgtgaacaaagcggaatctgctctggcccagcaagccaagcatttctcagccctgcgagatgtcatcaaggccttacgcctggccatgcagctggaagagcaggctagcagacaaataagcagcaagaaacggccccagtgacgactgcaaataaaaatctgtttggtttgacacccagcctcttccctggccctccccagagaactttgggtacctggtgggtctaggcagggtctgagctgggacaggttctggtaaatgccaagtatgggggcatctgggcccagggcagctggggagggggtcagagtgacatgggacactccttttctgttcctcagttgtcgccctcacgagaggaaggagctcttagttacccttttgtgttgcccttctttccatcaaggggaatgttctcagcatagagctttctccgcagcatcctgcctgcgtggactggctgctaatggagagctccctggggttgtcctggctctggggagagagacggagcctttagtacagctatctgctggctctaaaccttctacgcctttgggccgagcactgaatgtcttgtactttaaaaaaatgtttctgagacctctttctactttactgtctccctagagtcctagaggatccctactgttttctgttttatgtgtttatacattgtatgtaacaataaagagaaaaaataaaaaaaaaaaaaaaaaaaaaaaaaaaaaaaa

SEQ ID NO: 487 - protein, 566 aa, Homo sapiens
MFVSDFRKEFYEVVQSQRVLLFVASDVDALCACKILQALFQCDHVQYTLVPVSGWQELETAFLEHKEQFHYFILINCGANVDLLDILQPDEDTIFFVCDTHRPVNVVNVYNDTQIKLLIKQDDDLEVPAYEDIFRDEEEDEEHSGNDSDGSEPSEKRTRLEEEIVEQTMRRRQRREWEARRRDILFDYEQYEYHGTSSAMVMFELAWMLSKDLNDMLWWAIVGLTDQWVQDKITQMKYVTDVGVLQRHVSRHNHRNEDEENTLSVDCTRISFEYDLRLVLYQHWSLHDSLCNTSYTAARFKLWSVHGQKRLQEFLADMGLPLKQVKQKFQAMDISLKENLREMIEESANKFGMKDMRVQTFSIHFGFKHKFLASDVVFATMSLMESPEKDGSGTDHFIQALDSLSRSNLDKLYHGLELAKKQLRATQQTIASCLCTNLVISQGPFLYCSLMEGTPDVMLFSRPASLSLLSKHLLKSFVCSTKNRRCKLLPLVMAAPLSMEHGTVTVVGIPPETDSSDRKNFFGRAFEKAAESTSSRMLHNHFDLSVIELKAEDRSKFLDALISLLS

SEQ ID NO: 488 - DNA, 1938 bp, Homo sapiens
gatttggcgggagtcttgaccgccgccgggctcttggtacctcagcgcgagcgccaggcgtccggccgccgtggctatgttcgtgtccgatttccgcaaagagttctacgaggtggtccagagccagagggtccttctcttcgtggcctcggacgtggatgctctgtgtgcgtgcaagatccttcaggccttgttccagtgtgaccacgtgcaatatacgctggttccagtttctgggtggcaagaacttgaaactgcatttcttgagcataaagaacagtttcattattttattctcataaactgtggagctaatgtagacctattggatattcttcaacctgatgaagacactatattctttgtgtgtgacacccataggccagtcaatgtcgtcaatgtatacaacgatacccagatcaaattactcattaaacaagatgatgaccttgaagttcccgcctatgaagacatcttcagggatgaagaggaggatgaagagcattcaggaaatgacagtgatgggtcagagccttctgagaagcgcacacggttagaagaggagatagtggagcaaaccatgcggaggaggcagcggcgagagtgggaggcccggagaagagacatcctctttgactacgagcagtatgaatatcatgggacatcgtcagccatggtgatgtttgagctggcttggatgctgtccaaggacctgaatgacatgctgtggtgggccatcgttggactaacagaccagtgggtgcaagacaagatcactcaaatgaaatacgtgactgatgttggtgtcctgcagcgccacgtttcccgccacaaccaccggaacgaggatgaggagaacacactctccgtggactgcacacggatctcctttgagtatgacctccgcctggtgctctaccagcactggtccctccatgacagcctgtgcaacaccagctataccgcagccaggttcaagctgtggtctgtgcatggacagaagcggctccaggagttccttgcagacatgggtcttcccctgaagcaggtgaagcagaagttccaggccatggacatctccttgaaggagaatttgcgggaaatgattgaagagtctgcaaataaatttgggatgaaggacatgcgcgtgcagactttcagcattcattttgggttcaagcacaagtttctggccagcgacgtggtctttgccaccatgtctttgatggagagccccgagaaggatggctcagggacagatcacttcatccaggctctggacagcctctccaggagtaacctggacaagctgtaccatggcctggaactcgccaagaagcagctgcgagccacccagcagaccattgccagctgcctttgcaccaacctcgtcatctcccaggggcctttcctgtactgctctctcatggagggcactccagatgtcatgctgttctctaggccggcatccctaagcctgctcagcaaacacctgctcaagtcctttgtgtgttcgacaaagaaccggcgctgcaaactgctgcccctggtgatggctgcccccctgagcatggagcatggcacagtgaccgtggtgggcatccccccagagaccgacagctcggacaggaagaacttttttgggagggcgtttgagaaggcagcggaaagcaccagctcccggatgctgcacaaccattttgacctctcagtaattgagctgaaagctgaggatcggagcaagtttctggacgcacttatttccctcctgtcctaggaatttgattcttccagaatgaccttcttatttatgtaactggctttcatttagattgtaagttatggacatgatttgagatgtagaagccattttttattaaataaaatgcttattttaggctccgtccccaaaaaaaaaaaaaaaaaaaaaaaaaaaaa

SEQ ID NO: 489 - protein, 219 aa, Homo sapiens
MSETAPAAPAAPAPAEKTPVKKKARKSAGAAKRKASGPPVSELITKAVAASKERSGVSLAALKKALAAAGYDVEKNNSRIKLGLKSLVSKGTLVQTKGTGASGSFKLNKKAASGEAKPKAKKAGAAKAKKPAGAAKKPKKATGAATPKKSAKKTPKKAKKPAAAAGAKKAKSPKKAKAAKPKKAPKSPAKAKAVKPKAAKPKTAKPKAAKPKKAAAKKK

SEQ ID NO: 490 - DNA, 785 bp, Homo sapiens
agtcccggccagtgcctctgcttccggctcgaattgctctcgctcacgcttgccttcaacatgtccgagactgcgcctgccgcgcccgctgctccggcccctgccgagaagactcccgtgaagaagaaggcccgcaagtctgcaggtgcggccaagcgcaaagcgtctgggcccccggtgtccgagctcattactaaagctgttgccgcctccaaggagcgcagcggcgtatctttggccgctctcaagaaagcgctggcagccgctggctatgacgtggagaagaacaacagccgcatcaagctgggtctcaagagcctggtgagcaagggcaccctggtgcagaccaagggcaccggcgcgtcgggttccttcaaactcaacaagaaggcggcctctggggaagccaagcctaaggctaaaaaggcaggcgcggccaaggccaagaagccagcaggagcggcgaagaagcccaagaaggcgacgggggcggccacccccaagaagagcgccaagaagaccccaaagaaggcgaagaagccggctgcagctgctggagccaaaaaagcgaaaagcccgaaaaaggcgaaagcagccaagccaaaaaaggcgcccaagagcccagcgaaggccaaagcagttaaacccaaggcggctaaaccaaagaccgccaagcccaaggcagccaagccaaagaaggcggcagccaagaaaaagtagaaagttcctttggccaactgcttagaagcccaacacaacccaaaggctcttttcagagccaccca

SEQ ID NO: 491 - protein, 910 aa, Homo sapiens
MRRSAAPSQLQGNSFKKPKFIPPGRSNPGLNEEITKLNPDIKLFEGVAINNTFLPSQNDLRICSLNLPSEESTREINNRDNCSGKYCFEAPTLATLDPPHTVHSAPKEVAVSKEQEEKSDSLVKYFSVVWCKPSKKKHKKWEGDAVLIVKGKSFILKNLEGKDIGRGIGYKFKELEKIEEGQTLMICGKEIEVMGVISPDDFSSGRCFQLGGGSTAISHSSQVARKCFSNPFKSVCKPSSKENRQNDFQNCKPRHDPYTPNSLVMPRPDKNHQWVFNKNCFPLVDVVIDPYLVYHLRPHQKEGIIFLYECVMGMRMNGRCGAILADEMGLGKTLQCISLIWTLQCQGPYGGKPVIKKTLIVTPGSLVNNWKKEFQKWLGSERIKIFTVDQDHKVEEFIKSIFYSVLIISYEMLLRSLDQIKNIKFDLLICDEGHRLKNSAIKTTTALISLSCEKRIILTGTPIQNDLQEFFALIDFVNPGILGSLSSYRKIYEEPIILSREPSASEEEKELGERRAAELTCLTGLFILRRTQEIINKYLPPKIENVVFCRPGALQIELYRKLLNSQVVRFCLQGLLENSPHLICIGALKKLCNHPCLLFNSIKEKECSSTCDKNEEKSLYKGLLSVFPADYNPLLFTEKESGKLQVLSKLLAVIHELRPTEKVVLVSNYTQTLNILQEVCKRHGYAYTRLDGQTPISQRQQIVDGFNSQHSSFFIFLLSSKAGGVGLNLIGGSHLILYDIDWNPATDIQAMSRVWRDGQKYPVHIYRLLTTGTIEEKIYQRQISKQGLCGAVVDLTKTSEHIQFSVEELKNLFTLHESSDCVTHDLLDCECTGEEVHTGDSLEKFIVSRDCQLGPHHQKSNSLKPLSMSQLKQWKHFSGDHLNLTDPFLERITENVSFIFQNITTQATGT

SEQ ID NO: 492 - DNA, 3057 bp, Homo sapiens
gagcttctccggcggcgaggggatagctggttaccagaaggacttctttgcagggccagtggtttctgtcagattttcgccggtcacgactgctgaatatgagacgatctgcagcaccaagtcagttgcaggggaattccttcaaaaaaccaaaatttatacctccaggaagaagtaatccaggtctgaatgaagagattacaaaactgaatccagatataaaattatttgagggtgttgcaattaataacacctttctcccgtcacaaaatgatcttagaatatgcagtttaaatctgcctagtgaagaaagtactagagaaatcaataacagagataattgcagtggaaaatattgttttgaagcacctacactggcaacattagatccacctcatacagttcattcggctcctaaagaagtagcagtgtccaaggaacaagaagagaaatctgatagcctagttaaatatttcagtgttgtttggtgtaagccttcaaagaaaaaacataaaaagtgggaaggtgatgctgttcttattgtaaaaggaaagtcatttatattaaagaatttggaaggcaaagacattggaagaggcattggttataaattcaaagagcttgaaaagattgaagagggccaaacactgatgatttgtggaaaagaaatagaagtcatgggtgtaatctctccagatgacttcagcagtggcaggtgttttcagcttggaggaggaagtactgctatctcgcattcttctcaggttgccaggaaatgtttctctaaccctttcaaaagtgtttgtaaaccaagttcaaaggaaaatagacagaatgatttccaaaattgcaaaccacgccatgacccatatacgccaaattccctcgttatgccacgaccagataagaatcaccagtgggtattcaataagaactgtttccctcttgtggatgtagtgattgatccttaccttgtatatcatcttcgaccacatcagaaagaaggaatcatattcctttatgaatgtgtaatgggaatgagaatgaatggcagatgtggagctattcttgctgatgaaatgggtttagggaagacattgcaatgtatttcgctcatctggaccctgcagtgtcagggaccctatggaggcaagccagtaataaagaagacactaattgtcacacctggaagcttggtgaataattggaagaaagaatttcaaaaatggctaggaagtgaaaggatcaagatatttactgttgatcaggaccacaaagttgaagaattcatcaagtctatattttattctgttcttattatcagttatgaaatgttacttcgttccctggatcaaattaagaatataaaatttgatcttctaatctgtgacgaggggcatcgtttgaagaacagtgccattaagacaactacagccctcattagcctttcttgtgagaaaagaataattctaactggtactccaattcagaatgatctgcaagaattttttgcattaattgattttgtaaatccaggaatattaggctctttgtcatcttataggaaaatatatgaagaacccatcattttatcgagagaaccttctgcttctgaggaagaaaaggagttaggagaaagaagagcagctgaacttacttgcctcactggactctttatccttagaagaacccaagaaattataaataaatatctcccacctaaaatagagaatgttgtcttttgccgaccaggagcactacagattgagctttatcgaaagctgttaaattctcaggttgtcaggttctgccttcaagggttgttggaaaatagtccccatctaatatgtataggagctcttaaaaaactgtgcaatcacccctgccttttgttcaactctataaaggaaaaggaatgtagctcaacttgtgataaaaatgaagaaaagagtctatacaaaggcttgctaagtgtgtttcctgctgactacaaccctctcctgtttactgaaaaggagtcaggaaaactacaggtgttgtccaagctcttagcggttatccacgaacttcgacctactgaaaaggtggtgttggtatccaactatacacaaaccttgaacattttacaagaagtatgtaagcgtcatggatatgcttatacaagacttgatggacaaacaccaatctctcaaaggcagcagattgttgatggctttaacagtcaacactcttctttttttatttttttgttaagttcaaaagctggtggtgtaggacttaacctcattggaggatctcacttaattctctatgacattgattggaatccagccactgacattcaggcaatgtctagagtatggagagatggtcagaaatatcctgtacatatttacagactcctaactacaggtacaatagaagaaaagatctatcaaaggcagatcagtaagcaaggtctttgtggggcagttgtcgacctcaccaagacatctgaacatattcagttttcagtagaagaacttaaaaatttgttcacattacatgaaagttcagattgtgttactcatgatctgcttgactgtgagtgtacaggagaagaagttcatacaggtgattcgttggaaaaattcattgtctctagagattgtcagcttggtccacatcaccagaaatctaactccctgaaacctctttctatgtcccagctgaagcaatggaaacatttttctggagatcatttaaatcttacagatccttttcttgaaagaataacagaaaatgtgtcattcatttttcagaatataaccactcaagctactggcacatagtgaaagattacttctgacattccattgctcttcttttgaaaattagtatggtaattaaatgtactttttgaaaattaatagaattatttaaattacagtatatgttgcaaaatatatcacttttgatacaatagtcaaaattgagtggtttaatgttttgtaaatattaagtgtttaaatgaaaaataaagatgtgcttatatcattgtaaaaaaaaaaaaaaaaa

SEQ ID NO: 493 - protein, 209 aa, Homo sapiens
MGKGDPNKPRGKMSSYAFFVQTCREEHKKKHPDSSVNFAEFSKKCSERWKTMSAKEKSKFEDMAKSDKARYDREMKNYVPPKGDKKGKKKDPNAPKRPPSAFFLFCSEHRPKIKSEHPGLSIGDTAKKLGEMWSEQSAKDKQPYEQKAAKLKEKYEKDIAAYRAKGKSEAGKKGPGRPTGSKKKNEPEDEEEEEEEEDEDEEEEDEDEE

SEQ ID NO: 494 - DNA, 1277 bp, Homo sapiens
gatgtggcccgtggcctagctcgtcaagttgccgtggcgcggagaactctgcaaaacaagaggctgaggattgcgttagagataaaccagttcacgccggagccccgtgagggaagcgtctccgttgggtccggccgctctgcgggactctgaggaaaagctcgcaccaggtggacgcggatctgtcaacatgggtaaaggagaccccaacaagccgcggggcaaaatgtcctcgtacgccttcttcgtgcagacctgccgggaagagcacaagaagaaacacccggactcttccgtcaatttcgcggaattctccaagaagtgttcggagagatggaagaccatgtctgcaaaggagaagtcgaagtttgaagatatggcaaaaagtgacaaagctcgctatgacagggagatgaaaaattacgttcctcccaaaggtgataagaaggggaagaaaaaggaccccaatgctcctaaaaggccaccatctgccttcttcctgttttgctctgaacatcgcccaaagatcaaaagtgaacaccctggcctatccattggggatactgcaaagaaattgggtgaaatgtggtctgagcagtcagccaaagataaacaaccatatgaacagaaagcagctaagctaaaggagaaatatgaaaaggatattgctgcatatcgtgccaagggcaaaagtgaagcaggaaagaagggccctggcaggccaacaggctcaaagaagaagaacgaaccagaagatgaggaggaggaggaggaagaagaagatgaagatgaggaggaagaggatgaagatgaagaataaatggctatcctttaatgatgcgtgtggaatgtgtgtgtgtgctcaggcaattattttgctaagaatgtgaattcaagtgcagctcaatactagcttcagtataaaaactgtacagatttttgtatagctgataagattctctgtagagaaaatacttttaaaaaatgcaggttgtagctttttgatgggctactcatacagttagattttacagcttctgatgttgaatgttcctaaatatttaatggtttttttaatttctgtgtgtatggtagcacagcaaacttgtaggaattagtatcaatagtaaattttgggttttttaggatgttgcatttcgtttttttaaaaaaaattttgtaataaaattatgtatattatttctattgtctttgtcttaatatgctaagttaattttcactttaaaaaagccatttgaagaccaaaaaaaaaaaaa

SEQ ID NO: 495 - protein, 874 aa, Homo sapiens
MDEEEDNLSLLTALLEENESALDCNSEENNFLTRENGEPDAFDELFDADGDGESYTEEADDGETGETRDEKENLATLFGDMEDLTDEEEVPASQSTENRVLPAPAPRREKTNEELQEELRNLQEQMKALQEQLKVTTIKQTASPARLQKSPEKSPRPPLKERRVQRIQESTCFSAELDVPALPRTKRVARTPKASPPDPKSSSSRMTSAPSQPLQTISRNKPSGITRGQIVGTPGSSGETTQPICVEAFSGLRLRRPRVSSTEMNKKMTGRKLIRLSQIKEKMAREKLEEIDWVTFGVILKKVTPQSVNSGKTFSIWKLNDLRDLTQCVSLFLFGEVHKALWKTEQGTVVGILNANPMKPKDGSEEVCLSIDHPQKVLIMGEALDLGTCKAKKKNGEPCTQTVNLRDCEYCQYHVQAQYKKLSAKRADLQSTFSGGRIPKKFARRGTSLKERLCQDGFYYGGVSSASYAASIAAAVAPKKKIQTTLSNLVVKGTNLIIQETRQKLGIPQKSLSCSEEFKELMDLPTCGARNLKQHLAKATASGIMGSPKPAIKSISASALLKQQKQRMLEMRRRKSEEIQKRFLQSSSEVESPAVPSSSRQPPAQPPRTGSEFPRLEGAPATMTPKLGRGVLEGDDVLFYDESPPPRPKLSALAEAKKLAAITKLRAKGQVLTKTNPNSIKKKQKDPQDILEVKERVEKNTMFSSQAEDELEPARKKRREQLAYLESEEFQKILKAKSKHTGILKEAEAEMQERYFEPLVKKEQMEEKMRNIREVKCRVVTCKTCAYTHFKLLETCVSEQHEYHWHDGVKRFFKCPCGNRSISLDRLPNKHCSNCGLYKWERDGMLKEKTGPKIGGETLLPRGEEHAKFLNSLK

SEQ ID NO: 496 - DNA, 4532 bp, Homo sapiens
gaacgaagaaggcgtcccggcatcggccaagattctacattgctcatctgggcatctgagcctccttcgaagtttcctgtcacaactgtcctcttgacagcatggatgaggaggaagacaatctgtctctgctgaccgcactgctggaagaaaatgagtcagccttggattgtaattcagaagaaaataacttcttgacgcgggaaaatggcgagcccgacgcatttgatgagctctttgatgccgacggcgacggtgaatcttatacagaagaggctgatgatggagaaacaggagagacaagagacgaaaaggaaaatctggccactctctttggagatatggaggacttaacagatgaagaagaagttcccgcatcacagtcaactgaaaatagggtcctccctgctcctgcccccaggcgagagaaaacgaatgaagagttgcaagaggaattaaggaatttgcaagagcaaatgaaggccttacaagagcagctaaaagtaacaacaattaaacagacagcaagcccagcccgtctgcaaaaatcccctgagaagtctccccggccacctcttaaggagaggagagttcagagaattcaggagtcaacatgcttttctgcggagcttgatgtccctgcgctaccaagaaccaagagggtggctcgaacaccaaaggcttcacctccagatcccaaaagctcatcttcaaggatgacaagtgcaccctcccaacccctacagacgatttctcggaacaaacctagtgggataactagaggtcaaattgtggggaccccaggaagttctggggaaacgactcaacccatctgtgtggaagccttctctggtctgcggctcaggcggcctcgagtatcctccacagaaatgaacaagaaaatgaccggccgaaaactgatcagactgtctcagatcaaggaaaagatggccagagagaagctggaagaaatagattgggtgacatttggggttatattgaagaaggttacgccacagagtgtgaatagtggaaaaaccttcagcatatggaaactgaatgatcttcgtgacctgacacaatgtgtgtccttgttcttatttggagaagttcacaaagcgctctggaagacggagcaggggactgtcgtagggatcctcaatgccaaccccatgaagcccaaggatggttcagaggaggtgtgtttatctatcgatcatcctcagaaggtcttaattatgggtgaagctcttgacctgggaacctgtaaagccaagaagaagaatggagagccgtgcacgcagactgtgaatttgcgtgactgtgagtactgtcagtaccatgtccaggctcagtacaagaagctcagcgcaaagcgtgcggatctgcagtccaccttctctggaggacgaattccaaagaagtttgcccgcagaggcaccagcctcaaagaacggctgtgccaagatggcttttactacggaggggtttcttctgcctcgtatgcagcttcaattgcagcagctgtggctcctaagaagaagattcaaaccactctgagtaatctggttgttaagggcacaaacttgatcatccaggaaacacggcaaaaactcggaataccccagaagagcctgtcttgctctgaggagttcaaggaactgatggacctgccgacgtgtggagccaggaacttaaaacaacatttagccaaagccacagcttcagggattatggggagcccaaaaccagccatcaagtccatctcggcctcagcactcttgaagcaacagaagcagcggatgttggagatgaggagaaggaaatcagaagaaatacagaagcgatttctgcagagctcaagtgaagttgagagcccagctgtgccatcttcatcaagacagccccctgctcagcctccacggacaggatccgagttccccaggctggagggagccccggccacaatgacgcccaagctggggcgaggtgtcttggaaggagatgatgttctcttttatgatgagtcaccaccaccaagaccaaaactgagtgctttagcagaagccaaaaagttagctgctatcaccaaattaagggcaaaaggccaggttcttacaaaaacaaacccaaacagcattaagaagaaacaaaaggaccctcaggacatcctggaggtgaaggaacgtgtagaaaaaaacaccatgttttcttctcaagctgaggatgaattggagcctgccaggaaaaaaaggagagaacaacttgcctatctggaatctgaggaatttcagaaaatcctaaaagcaaaatcaaaacacacaggcatcctgaaagaggccgaggctgagatgcaggagcgctactttgagccactggtgaaaaaagaacaaatggaagaaaagatgagaaacatcagagaagtgaagtgccgtgtcgtgacatgcaagacgtgcgcctatacccacttcaagctgctggagacctgcgtcagtgagcagcatgaataccactggcatgatggtgtgaagaggtttttcaaatgtccctgtggaaacagaagcatctccttggacagactcccgaacaagcactgcagtaactgtggcctctacaaatgggaacgggacggaatgctaaaggaaaagactggtccaaagataggaggagaaactctgttaccaagaggagaagaacatgctaaatttctgaacagccttaaataacccgaacttcagacattttcccacagacttcctggcctcctgtgactctggaaagcaaaggattggctgtgtattgtccattgattcctgattgacgccgtcaaaaacaaatgcttgttaagcccataagctttgcctgcttactttctgccattgggttggtttgataccacatttaacattgacatttaagtggaaaaccaagttatcattgtcttttctaagctcagtgtggatgattgcattacttcattcactgaagtttttgcccaaaaattggaaggtaaacagagagctatgtttctgtatcttttggttatagagtgttcacttctttatcataacaaaattctagtgtttatacgaacacccagaggcaaaagaatttggcttaattctcactccaggtaagtagcttaacttctgggcttcagttttctcatctgtaaaatcaggaagattggactaagtgatcctgaaatgtattttttagcactggatttctacaaataataaaactttcccatctagataatgatgatcacatagtcttgatgtacggacattaaaagccagatttcttcattcaattctgttatctctgttttactctttgaaattgatcaagccactgaatcactttgcatttcagtttatatatatagagagaaagaaggtgtctgctcttacattattgtggagccctgtgatagaaatatgtaaaatctcatattattttttttttaatttttttattttttatgacagggtctcactatgtcaccctggctggagtgcagtagtgcgatcgcggcacactgcagccttggcttccctgggctcaagcagtcctcccacctcagtctcccaaatagctaggactacaggcgtgcgtgaccaagcccagctaatttttgcattttttgtagagatggggttttgccatgttgctcaggctggtctcaaactcctgagcactagcaatccacccacctctgtttccaaaaaaaaaaaaaaaatgaaaggtcaacccctatgcaaattaccacagcaaaggtttcattcaggagattcttccatctgggcaacctggttttccaaatatcatttgacctaagtgaatgttgatactagctaaagattgggtaaattggttgaattattgtattgaagcttgagctgtagctaaaagtaatttaggtttcccctaagatgttattatgttagggacataacacttttgggaggttgttgtgggagatggttgatttaggttttcaaaagctagaaataaaatttacatgccttagatttcataaaattctgctctaattgggtggaaggtgctgtatctaacttgtgttcctcctaaggttatgtcctaataactattcttttaggagtatacttctactttatagaaggttgcttttctttttaattttttctaacaaagaaaagaataaagtatttattaataagaaccagaaagcacttgaaactgatgtttttaatggctcatttagggtagatttatttatctcattaacttaaaacagctatgtgtatgaaataggtcacaacagaacttgaacaccaggttggtgtctgagcaatccctttcttatgggaaaaacaatgttcttgtttgaacagagggtatcattgcagtcagtattcacgtgtatattgttatataagttgtataatatgcttgtaaaggctgagggtgagctgtatctggatgcctttttacaatttgattttaacttttaaaataaatttaaaacataaaaaaaaaaaaaa

SEQ ID NO: 497 - protein, 876 aa, Homo sapiens
MELITILEKTVSPDRLELEAAQKFLERAAVENLPTFLVELSRVLANPGNSQVARVAAGLQIKNSLTSKDPDIKAQYQQRWLAIDANARREVKNYVLQTLGTETYRPSSASQCVAGIACAEIPVNQWPELIPQLVANVTNPNSTEHMKESTLEAIGYICQDIDPEQLQDKSNEILTAIIQGMRKEEPSNNVKLAATNALLNSLEFTKANFDKESERHFIMQVVCEATQCPDTRVRVAALQNLVKIMSLYYQYMETYMGPALFAITIEAMKSDIDEVALQGIEFWSNVCDEEMDLAIEASEAAEQGRPPEHTSKFYAKGALQYLVPILTQTLTKQDENDDDDDWNPCKAAGVCLMLLATCCEDDIVPHVLPFIKEHIKNPDWRYRDAAVMAFGCILEGPEPSQLKPLVIQAMPTLIELMKDPSVVVRDTAAWTVGRICELLPEAAINDVYLAPLLQCLIEGLSAEPRVASNVCWAFSSLAEAAYEAADVADDQEEPATYCLSSSFELIVQKLLETTDRPDGHQNNLRSSAYESLMEIVKNSAKDCYPAVQKTTLVIMERLQQVLQMESHIQSTSDRIQFNDLQSLLCATLQNVLRKVQHQDALQISDVVMASLLRMFQSTAGSGGVQEDALMAVSTLVEVLGGEFLKYMEAFKPFLGIGLKNYAEYQVCLAAVGLVGDLCRALQSNIIPFCDEVMQLLLENLGNENVHRSVKPQILSVFGDIALAIGGEFKKYLEVVLNTLQQASQAQVDKSDYDMVDYLNELRESCLEAYTGIVQGLKGDQENVHPDVMLVQPRVEFILSFIDHIAGDEDHTDGVVACAAGLIGDLCTAFGKDVLKLVEARPMIHELLTEGRRSKTNKAKTLATWATKELRKLKNQA

SEQ ID NO: 498 - DNA, 4205 bp, Homo sapiens
ctccctcgctccctccctgcgcgccgcctctcactcacagcctcccttccttctttctccctccgcctcccgagcaccagcgcgctctgagctgcccccagggtccctcccccgccgccagcagcccatttggagggaggaagtaagggaagaggagaggaaggggagccggaccgactacccagacagagccggtgaatgggtttgtggtgacccccgccccccaccccaccctcccttcccacccgacccccaacccccatccccagttcgagccgccgcccgaaaggccgggccgtcgtcttaggaggagtcgccgccgccgccacctccgccatggagctgatcaccattctcgagaagaccgtgtctcccgatcggctggagctggaagcggcgcagaagttcctggagcgtgcggccgtggagaacctgcccactttccttgtggaactgtccagagtgctggcaaatccaggaaacagtcaggttgccagagttgcagctggtctacaaatcaagaactctttgacatctaaagatccagatatcaaggcacaatatcagcagaggtggcttgctattgatgctaatgctcgacgagaagtcaagaactatgttttgcagacattgggtacagaaacttaccggcctagttctgcctcacagtgtgtggctggtattgcttgtgcagagatcccagtaaaccagtggccagaactcattcctcagctggtggccaatgtcacaaaccccaacagcacagagcacatgaaggagtcgacattggaagccatcggttatatttgccaagatatagacccagagcagctacaagataaatccaatgagattctgactgccataatccaggggatgaggaaagaagagcctagtaataatgtgaagctagctgctacgaatgcactcctgaactcattggagttcaccaaagcaaactttgataaagagtctgaaaggcactttattatgcaggtggtctgtgaagccacacagtgtccagatacgagggtacgagtggctgctttacagaatctggtgaagataatgtccttatattatcagtacatggagacatatatgggtcctgctctttttgcaatcacaatcgaagcaatgaaaagtgacattgatgaggtggctttacaagggatagaattctggtccaatgtctgtgatgaggaaatggatttggccattgaagcttcagaggcagcagaacaaggacggccccctgagcacaccagcaagttttatgcgaagggagcactacagtatctggttccaatcctcacacagacactaactaaacaggacgaaaatgatgatgacgatgactggaacccctgcaaagcagcaggggtgtgcctcatgcttctggccacctgctgtgaagatgacattgtcccacatgtcctccccttcattaaagaacacatcaagaacccagattggcggtaccgggatgcagcagtgatggcttttggttgtatcttggaaggaccagagcccagtcagctcaaaccactagttatacaggctatgcccaccctaatagaattaatgaaagaccccagtgtagttgttcgagatacagctgcatggactgtaggcagaatttgtgagctgcttcctgaagctgccatcaatgatgtctacttggctcccctgctacagtgtctgattgagggtctcagtgctgaacccagagtggcttcaaatgtgtgctgggctttctccagtctggctgaagctgcttatgaagctgcagacgttgctgatgatcaggaagaaccagctacttactgcttatcttcttcatttgaactcatagttcagaagctcctagagactacagacagacctgatggacaccagaacaacctgaggagttctgcatatgaatctctgatggaaattgtgaaaaacagtgccaaggattgttatcctgctgtccagaaaacgactttggtcatcatggaacgactgcaacaggttcttcagatggagtcacatatccagagcacatccgatagaatccagttcaatgaccttcagtctttactctgtgcaactcttcagaatgttcttcggaaagtgcaacatcaagatgctttgcagatctctgatgtggttatggcctccctgttaaggatgttccaaagcacagctgggtctgggggagtacaagaggatgccctgatggcagttagcacactggtggaagtgttgggtggtgaattcctcaagtacatggaggcctttaaacccttcctgggcattggattaaaaaattatgctgaataccaggtttgtttggcagctgtgggcttagtgggagacttgtgccgtgccctgcaatccaacatcatacctttctgtgacgaggtgatgcagctgcttctggaaaatttggggaatgagaacgtccacaggtctgtgaagccgcagattctgtcagtgtttggtgatattgcccttgctattggaggagagtttaaaaaatacttagaggttgtattgaatactcttcagcaggcctcccaagcccaggtggacaagtcagactatgacatggtggattatctgaatgagctaagggaaagctgcttggaagcctatactggaatcgtccagggattaaagggggatcaggagaacgtacacccggatgtgatgctggtacaacccagagtagaatttattctgtctttcattgaccacattgctggagatgaggatcacacagatggagtagtagcttgtgctgctggactaataggggacttatgtacagcatttgggaaggatgtactgaaattagtagaagctaggccaatgatccatgaattgttaactgaagggcggagatcgaagactaacaaagcaaaaacccttgctacatgggcaacaaaagaactgaggaaactgaagaaccaagcttgatctgttaccattgggatgataacctgaggacccccactggaaatctcccatcttttgaaaaacctggaagtgaggagtgtgcacggatgctgaatgtttgggaatgagaggatgagtgagtgaggcttgaaaacacaccacattgaaaatcctgccacagcagcagccgcagccgccaacagcagcgctgttagtgagctaagtaagcactgacttcgtagaaaaccataacatcggccatcttggaaaagagaaaaacaatggagttacttatttaaaaaaaaagaaagaaagttatctcttcccaggagaggctagaagtagcttttctgtcttttggccagtgccgagtggaatgcctggtttgggggaggaggagggactgggttcagctgtggtgctttgttgtaaaaggcagcctggcctttgctactgaggagaaagatggagcctgggtctcaagcccaccttcgctgtacctttgccacatggtactgtatgcttgccagctagaaggagggtcagggattttttacagtctgagaatgagtgtgtgtgagtgaggcggtatccacattctcaacttcaagtcattgcagtttctttttcccagaaaacaaggggttagatgttgcatttcataaaactaaccgaagttctgtctactgatgcagcacaagagatgtaaaaaaaaaaaaaaaaaaaaaaaaaaaaacacacacacagaggaaagacgctctttaggttttgttttgttttttttttttggttttgttttttgttttttttactctagggaaaacactgacgaatggtcagagctcctatcctgatcttttcatcaaggcgcctttcctaataatatggttcaactgtgaatgtagaagtgggggggaggggggagaaaaagaaaactctggcgttagaggatatagaaaaatataagtacaattgttacaaataacgcagacttcaaaaacaaaaaaatcacaacccaaacaaaccaaaatttaaatgatcagaattggcagcacaaagaaaacgccctctcctgacttgtattgtggcagtctgaacgcccccagaaaattgtgccaaagagtttagaaaaataaatatacaataaaagtaaacacatacacacaaaacagcaaacttcaggtaactattttggattgcaaacaggataaattaaatgttcaaacaatctgataaaataaccatttggaaactgaaaa

SEQ ID NO: 499 - protein, 763 aa, Homo sapiens
MKASPRRPLILKRRRLPLPVQNAPSETSEEEPKRSPAQQESNQAEASKEVAESNSCKFPAGIKIINHPTMPNTQVVAIPNNANIHSIITALTAKGKESGSSGPNKFILISCGGAPTQPPGLRPQTQTSYDAKRTEVTLETLGPKPAARDVNLPRPPGALCEQKRETCADGEAAGCTINNSLSNIQWLRKMSSDGLGSRSIKQEMEEKENCHLEQRQVKVEEPSRPSASWQNSVSERPPYSYMAMIQFAINSTERKRMTLKDIYTWIEDHFPYFKHIAKPGWKNSIRHNLSLHDMFVRETSANGKVSFWTIHPSANRYLTLDQVFKPLDPGSPQLPEHLESQQKRPNPELRRNMTIKTELPLGARRKMKPLLPRVSSYLVPIQFPVNQSLVLQPSVKVPLPLAASLMSSELARHSKRVRIAPKVLLAEEGIAPLSSAGPGKEEKLLFGEGFSPLLPVQTIKEEEIQPGEEMPHLARPIKVESPPLEEWPSPAPSFKEESSHSWEDSSQSPTPRPKKSYSGLRSPTRCVSEMLVIQHRERRERSRSRRKQHLLPPCVDEPELLFSEGPSTSRWAAELPFPADSSDPASQLSYSQEVGGPFKTPIKETLPISSTPSKSVLPRTPESWRLTPPAKVGGLDFSPVQTSQGASDPLPDPLGLMDLSTTPLQSAPPLESPQRLLSSEPLDLISVPFGNSSPSDIDVPKPGSPEPQVSGLAANRSLTEGLVLDTMNDSLSKILLDISFPGLDEDPLGPDNINWSQFIPELQ

SEQ ID NO: 500 - DNA, 3336 bp, Homo sapiens
  misc_feature (3317)...(3317): N=A, T, G, or C
cggcggcgactgcagtctggagggtccacacttgtgattctcaatggagagtgaaaacgcagattcataatgaaagctagcccccgtcggccactgattctcaaaagacggaggctgccccttcctgttcaaaatgccccaagtgaaacatcagaggaggaacctaagagatcccctgcccaacaggagtctaatcaagcagaggcctccaaggaagtggcggagtccaactcttgcaagtttccagctgggatcaagattattaaccaccccaccatgcccaacacgcaagtagtggccatccccaacaatgctaatattcacagcatcatcacagcactgactgccaagggaaaagagagtggcagtagtgggcccaacaaattcatcctcatcagctgtgggggagccccaactcagcctccaggactccggcctcaaacccaaaccagctatgatgccaaaaggacagaagtgaccctggagaccttgggaccaaaacctgcagctagggatgtgaatcttcctagaccacctggagccctttgcgagcagaaacgggagacctgtgcagatggtgaggcagcaggctgcactatcaacaatagcctatccaacatccagtggcttcgaaagatgagttctgatggactgggctcccgcagcatcaagcaagagatggaggaaaaggagaattgtcacctggagcagcgacaggttaaggttgaggagccttcgagaccatcagcgtcctggcagaactctgtgtctgagcggccaccctactcttacatggccatgatacaattcgccatcaacagcactgagaggaagcgcatgactttgaaagacatctatacgtggattgaggaccactttccctactttaagcacattgccaagccaggctggaagaactccatccgccacaacctttccctgcacgacatgtttgtccgggagacgtctgccaatggcaaggtctccttctggaccattcaccccagtgccaaccgctacttgacattggaccaggtgtttaagccactggacccagggtctccacaattgcccgagcacttggaatcacagcagaaacgaccgaatccagagctccgccggaacatgaccatcaaaaccgaactccccctgggcgcacggcggaagatgaagccactgctaccacgggtcagctcatacctggtacctatccagttcccggtgaaccagtcactggtgttgcagccctcggtgaaggtgccattgcccctggcggcttccctcatgagctcagagcttgcccgccatagcaagcgagtccgcattgcccccaaggtgctgctagctgaggaggggatagctcctctttcttctgcaggaccagggaaagaggagaaactcctgtttggagaagggttttctcctttgcttccagttcagactatcaaggaggaagaaatccagcctggggaggaaatgccacacttagcgagacccatcaaagtggagagccctcccttggaagagtggccctccccggccccatctttcaaagaggaatcatctcactcctgggaggattcgtcccaatctcccaccccaagacccaagaagtcctacagtgggcttaggtccccaacccggtgtgtctcggaaatgcttgtgattcaacacagggagaggagggagaggagccggtctcggaggaaacagcatctactgcctccctgtgtggatgagccggagctgctcttctcagaggggcccagtacttcccgctgggccgcagagctcccgttcccagcagactcctctgaccctgcctcccagctcagctactcccaggaagtgggaggaccttttaagacacccattaaggaaacgctgcccatctcctccaccccgagcaaatctgtcctccccagaacccctgaatcctggaggctcacgcccccagccaaagtagggggactggatttcagcccagtacaaacctcccagggtgcctctgaccccttgcctgaccccctggggctgatggatctcagcaccactcccttgcaaagtgctcccccccttgaatcaccgcaaaggctcctcagttcagaacccttagacctcatctccgtcccctttggcaactcttctccctcagatatagacgtccccaagccaggctccccggagccacaggtttctggccttgcagccaatcgttctctgacagaaggcctggtcctggacacaatgaatgacagcctcagcaagatcctgctggacatcagctttcctggcctggacgaggacccactgggccctgacaacatcaactggtcccagtttattcctgagctacagtagagccctgcccttgcccctgtgctcaagctgtccaccatcccgggcactccaaggctcagtgcaccccaagcctctgagtgaggacagcaggcagggactgttctgctcctcatagctccctgctgcctgattatgcaaaagtagcagtcacaccctagccactgctgggaccttgtgttccccaagagtatctgattcctctgctgtccctgccaggagctgaagggtgggaacaacaaaggcaatggtgaaaagagattaggaaccccccagcctgtttccattctctgcccagcagtctcttaccttccctgatctttgcagggtggtccgtgtaaatagtataaattctccaaattatcctctaattataaatgtaagcttatttccttagatcattatccagagactgccagaaggtgggtaggatgacctggggtttcaattgacttctgttccttgcttttagttttgatagaagggaagacctgcagtgcacggtttcttccaggctgaggtacctggatcttgggttcttcactgcagggacccagacaagtggatctgcttgccagagtcctttttgcccctccctgccacctccccgtgtttccaagtcagctttcctgcaagaagaaatcctggttaaaaaagtcttttgtattgggtcaggagttgaatttggggtgggaggatggatgcaactgaagcagagtgtgggtgcccagatgtgcgctattagatgtttctctgataatgtccccaatcataccagggagactggcattgacgagaactcaggtggaggcttgagaaggccgaaagggcccctgacctgcctggcttccttagcttgcccctcagctttgcaaagagccaccctaggccccagctgaccgcatgggtgtgagccagcttgagaacactaactactcaataaaagcgaaggtggaccnaaaaaaaaaaaaaaaaaaa

SEQ ID NO: 501 - protein, 952 aa, Homo sapiens
MAEGGAADLDTQRSDIATLLKTSLRKGDTWYLVDSRWFKQWKKYVGFDSWDKYQMGDQNVYPGPIDNSGLLKDGDAQSLKEHLIDELDYILLPTEGWNKLVSWYTLMEGQEPIARKVVEQGMFVKHCKVEVYLTELKLCENGNMNNVVTRRFSKADTIDTIEKEIRKIFSIPDEKETRLWNKYMSNTFEPLNKPDSTIQDAGLYQGQVLVIEQKNEDGTWPRGPSTPNVKNSNYCLPSYTAYKNYDYSEPGRNNEQPGLCGLSNLGNTCFMNSAIQCLSNTPPLTEYFLNDKYQEELNFDNPLGMRGEIAKSYAELIKQMWSGKFSYVTPRAFKTQVGRFAPQFSGYQQQDCQELLAFLLDGLHEDLNRIRKKPYIQLKDADGRPDKVVAEEAWENHLKRNDSIIVDIFHGLFKSTLVCPECAKISVTFDPFCYLTLPLPMKKERTLEVYLVRMDPLTKPMQYKVVVPKIGNILDLCTALSALSGIPADKMIVTDIYNHRFHRIFAMDENLSSIMERDDIYVFEININRTEDTEHVIIPVCLREKFRHSSYTHHTGSSLFGQPFLMAVPRNNTEDKLYNLLLLRMCRYVKISTETEETEGSLHCCKDQNINGNGPNGIHEEGSPSEMETDEPDDESSQDQELPSENENSQSEDSVGGDNDSENGLCTEDTCKGQLTGHKKRLFTFQFNNLGNTDINYIKDDTRHIRFDDRQLRLDERSFLALDWDPDLKKRYFDENAAEDFEKHESVEYKPPKKPFVKLKDCIELFTTKEKLGAEDPWYCPNCKEHQQATKKLDLWSLPPVLVVHLKRFSYSRYMRDKLDTLVDFPINDLDMSEFLINPNAGPCRYNLIAVSNHYGGMGGGHYTAFAKNKDDGKWYYFDDSSVSTASEDQIVSKAAYVLFYQRQDTFSGTGFFPLDRETKGASAATGIPLESDEDSNDNDNDIENENCMHTN

SEQ ID NO: 502 - DNA, 4611 bp, Homo sapiens
tggaagaagatggcggaaggcggagcggcggatctggacacccagcggtctgacatcgcgacgctgctcaaaacctcgctccggaaaggggacacctggtacctagtcgatagtcgctggttcaaacagtggaaaaaatatgttggctttgacagttgggacaaataccagatgggagatcaaaatgtgtatcctggacccattgataactctggacttctcaaagatggtgatgcccagtcacttaaggaacatcttattgatgaattggattacatactgttgccaactgaaggttggaataaacttgtcagctggtacacattgatggaaggtcaagagccaatagcacgaaaggtggttgaacagggtatgtttgtaaagcactgcaaagtagaagtatatctcacagaattgaagctatgtgaaaatggaaacatgaataatgttgtaactcgaagatttagcaaagctgacacaatagatacaattgaaaaggaaataagaaaaatcttcagtattccagatgaaaaggagaccagattgtggaacaaatacatgagtaacacatttgaaccactgaataaaccagacagcaccattcaggatgctggtttataccaaggacaggtattagtgatagaacagaaaaatgaagatggaacatggccaaggggtccttctactcctaatgtgaaaaactcaaattactgtcttccatcatataccgcttataagaactatgattattcggaacctggaagaaacaatgaacagccaggcctctgtggcctaagtaacttgggaaatacgtgtttcatgaactcagctattcagtgtttgagcaacacacctccacttactgagtatttcctcaatgataagtatcaagaagaactgaattttgacaatcccttaggaatgagaggtgaaatagctaaatcttatgccgaactgatcaagcaaatgtggtctggaaagtttagctacgtcaccccaagagcctttaagacacaggtaggacgttttgcacctcagttctctggatatcagcagcaagactgtcaagaactgttagctttcctattagatggattacatgaggatttgaatagaattaggaaaaaaccatatatacaattaaaagatgcagatggaaggccagataaggtggttgccgaagaagcctgggaaaaccatttaaaacgaaatgattctatcatagtagatatatttcatggccttttcaaatcaactttagtttgtcctgagtgtgctaagatttcagtaacatttgatcctttttgttacttgacacttccattgcccatgaaaaaagaacgcaccttggaagtttacttagttagaatggatccgcttaccaaacctatgcagtacaaagtggttgtccccaaaattggaaacatattagatctttgtacagcattgtctgctttgtcaggaatacctgcagataagatgatagttactgatatatacaatcatagatttcacagaatattcgctatggatgaaaaccttagtagtattatggaacgggatgatatttatgtgtttgaaattaacatcaataggacagaagatacagagcacgtgattattcctgtttgcctaagagaaaaattcagacactcgagttatacccaccatactggttcttcactttttggtcagccctttcttatggctgtaccacgaaacaatactgaagacaaactttataatctcctgctcttgagaatgtgccgatatgtcaaaatatctactgaaactgaagaaactgaaggatccctacactgctgtaaggaccaaaatattaatgggaatggcccaaatggcatacatgaagaaggctcaccaagtgaaatggaaacagatgagccagatgatgaatccagccaggatcaagaacttccctcagagaatgaaaacagtcagtctgaagattcagttggaggagataatgattctgaaaatggattatgtactgaggatacttgcaaaggtcaactcacgggacacaaaaaacgattgtttacattccagttcaacaacttaggcaatactgatatcaactacatcaaagatgataccaggcatataagatttgatgataggcagcttaggctagatgaaagatcttttcttgctttggattgggatcctgatttgaaaaaaagatattttgatgaaaatgctgctgaggactttgaaaaacatgaaagtgtggagtataaacctcctaaaaaaccctttgtgaaattaaaagattgcattgaactttttacaacaaaagaaaagctaggtgctgaagatccctggtattgtccgaattgtaaagaacatcagcaagccacaaagaaattggatttatggtccctgcctccagtacttgtagtacatctcaagcgattttcttacagtcgatacatgagagacaagttggataccttagttgattttcctatcaatgacttggatatgtcggaattcttaattaatccaaatgcaggtccttgccgctataatctgattgctgtttccaaccactatggagggatgggaggaggacactatactgcttttgcaaaaaataaagatgatggaaaatggtactattttgatgacagtagtgtctccactgcatctgaagaccaaattgtgtccaaagcagcatatgtactcttctaccagagacaagacactttcagtggaactggcttttttcctcttgaccgagaaactaaaggtgcttcagctgccactggcatcccattagaaagtgatgaagatagcaatgataatgacaatgatatagaaaatgaaaactgtatgcacactaactaatgaaagtcctagaagccataaaagagacactttcctgctggtggtatctatggaaatgatgaagttacccaccacattaaaacaaaagtctgagatggggagtttcagataaccgaatgtaaatcctttatcagattttaacttgtgcagtacttgaagtgaaacacaatgaaaactttaacagaaattgtctcttaatacatttacagtcttgtatttacaagctaaatatatataggaaatcacaaataaatcccttttaagtttgctgctgttttgattaattatgtttcctttaattttttggatgtgagttgatgacaaatgttaaatttgtggatgttggtcatttattttgctctaataatactgcaagaaaactatggctgaacttagtttttggataatctagttcatgtgcattaggctgccgtatatactactatgatatttagctgcagtatcaatgtggcataaatactgcggcagcattcttcgaaaaccgcattttcaaatttatccccgtaatcaatgtgggcctattaaaaaaccaaatcatgatacaagaaacaaccttggaaaagttatttccctttgtaatacctttaaaaatccagagtattatattcattttactgccactgtggaaacaggttctagatttcatactccatctaaagtcatttttcagttacatgtaagtattatttactgctattgggatctattcttcagatattcaaaaacattttttgctttaaaatgcatatctttaattgggtgttggtccaaaattaaaatttttgctgtctgtttttctctaccccattttgtggtaatttggcaacttgagctctcccaattattgtaatataaggacagacataatagtattctgtacccatagtaataattgcatcaagcttagatgagaaatttttttcatatactggcctttaaatcattaatggacaattggctataaaggtaggtctgttaactttctttgtgtgttcctgatggaattcaccatagccttacagcttttctcagaaggtaacttgttataagagaaatggcatttgcatgttccagagtcagaacctgtacagtatataaagcataaacaccttgaatttgattttagttcaccacattcaaggatccaggatgccaaaaatatgtgtgaacatttgaaacatttttatttgctgctttttccctttgatatagttgaaagaatgtattgtaaattggcatacaatactgcctttaatagaaaacctaaatgctggggcacatttcacatatcgactacctgagaaattgctttgtgtcccactgttattaaagcaaaaagtataatgttcttcacttgaactaatcaaatacaatagattataaattgtgtattgtaaataaaagttcactctgtgagtgcacattttggtaaattatttatttatgttagcatttaaaagtttaaaaaaaatgcatttgaccaggataaatgaggtatgttgatcatggctttgctttatatcttgatattaaagctggtttatcatcctggtattttaaaagctgctttggggttttttttttcttttttttttttttaatgtaaactaacctcctgcatgacagaggttaaaattttgtctgcacttgagttcacttgagtttacatttgaaatgtgcatgtttatttatatagatttcaataaagctattcaaggcctt

SEQ ID NO: 503 - protein, 187 aa, Homo sapiens
MVGSLNCIVAVSQNMGIGKNGDLPWPPLRNEFRYFQRMTTTSSVEGKQNLVIMGKKTWFSIPEKNRPLKGRINLVLSRELKEPPQGAHFLSRSLDDALKLTEQPELANKVDMVWIVGGSSVYKEAMNHPGHLKLFVTRIMQDFESDTFFPEIDLEKYKLLPEYPGVLSDVQEEKGIKYKFEVYEKND

SEQ ID NO: 504 - DNA, 3900 bp, Homo sapiens
cgatggccctgcccagtcccagacagaacctactacgtgcggcggcagctggggcgggaaggcgggcgctgggggcgctgcggccgctgcagcgcagggtccacctggtcggctgcacctgtggaggaggaggtggatttcaggcttcccgtagactggaagaatcggctcaaaaccgcttgcctcgcaggggctgagctggaggcagcgaggccgcccgacgcaggcttccggcgagacatggcagggcaaggatggcagcccggcggcagggcccggcgaggagcgcgaacccgcggccgcagttcccaggcgtctgcgggcgcgagcacgccgcgaccctgcgtgcgccggggcgggggggcggggcctcgcctgcacaaatagggacgagggggcggggcggccacaatttcgcgccaaacttgaccgcgcgttctgctgtaacgagcgggctcggaggtcctcccgctgctgtcatggttggttcgctaaactgcatcgtcgctgtgtcccagaacatgggcatcggcaagaacggggacctgccctggccaccgctcaggaatgaattcagatatttccagagaatgaccacaacctcttcagtagaaggtaaacagaatctggtgattatgggtaagaagacctggttctccattcctgagaagaatcgacctttaaagggtagaattaatttagttctcagcagagaactcaaggaacctccacaaggagctcattttctttccagaagtctagatgatgccttaaaacttactgaacaaccagaattagcaaataaagtagacatggtctggatagttggtggcagttctgtttataaggaagccatgaatcacccaggccatcttaaactatttgtgacaaggatcatgcaagactttgaaagtgacacgttttttccagaaattgatttggagaaatataaacttctgccagaatacccaggtgttctctctgatgtccaggaggagaaaggcattaagtacaaatttgaagtatatgagaagaatgattaatatgaaggtgttttctagtttaagttgttccccctccctctgaaaaaagtatgtatttttacattagaaaaggttttttgttgactttagatctataattatttctaagcaacttgtttttattccccactactcttctctctatcagataccatttatgagacattcttgctataactaagtgcttctccaagaccccaactgagtccccagcacctgctacagtgagctgccattccacacccatcacatgtggcactcttgccagtccttgacattgtcgggcttttcacatgttggtaatatttattaaagatgaagatccacatacccttcaactgagcagtttcactagtggaaataccaaaagcttcctacgtgtatatccagaggtttgtagataaatgttgccaccttgtttgtaacagtgaaaaattgaaaacaacctggaagtccagtgatgggaaaatgagtatgtttctgtcttagattggggaacccaaagcagattgcaagactgaaatttcagtgaaagcagtgtatttgctaggtcataccagaaatcatcaattgaggtacggagaaactgaactgagaaggtaagaaaagcaatttaaagtcagcgagcaggttctcattgataacaagctccatactgctgagatacagggaaatggaggggggaaagctggagtattgatcccgcccccctccttggttgtcagctccctgtcctgtgtgtgggcggaacatagtccagctgctctatagcaagtctcaggtgtttgcagtaagaagctgctggcatgcacgggaacagtgaatgccaaacacttaaagcaattcgatgtttaagtatgtaagttcttttttttttagacagcgtttcgctcttgttgcccaggctagcatgcaatggtgtgacctcggcttactgcaacctccgccttcccagattcaagcgattctcctgcctcaggctcccaagtagctaggaccaggtgcgcgccaccacgcccggctaatttttgtattttgtatttttagtagagatggggtttcaccatgttggtcaggctagtctcgaactcgtgaccgcaagcgattcacccacctcagcctcccaaagtgctgggattaccggcttgagccaccacacccggcacatcttcattctttttatgtagtaaaaagtataaggccacacatggtttatttgaagtattttataatttaaaaaaatacagaagcaggaaaaccaattataagttcaagtgagggatgatggttgcttgaaccaaagggttgcatgtagtaagaaattgtgatttaagatatattttaaagttataagtagcaggatattctgatggagtttgactttggttttgggcccagggagtttcagatgcctttgagaaatgaatgaagtagagagaaaataaaagaaaaaccagccaggcacagtggctcacacctgtaatcccagcgctttgggaggctaaggcaggcagatcacttgagaccagcttgggcaacatggcaaagccccatctctacaaaaaacacaaaaattagctgggcattgtggcgcacacctgtattcccatctagtcaggaagctgagatggaagaattaattgagcccacgagttcaaggctgcagtgagtcgtgattgtgccactgcactccagccggggtgacagaagagaccttgtctcgaaaacgaatctgaaaacaatggaaccatgccttcataattctagaaagttattttcaactgataaatctatattcacccaaataatcaagggtgaaggtaaaataatacatttttagacaagcaaagactcaggggttacctccatgtgccctttttagggaagctgttggagaaaatactccagcaaaatgaaggagtacacaaaccagagaatgacatgaatccagcaaataggatccaacacaggcaatattccagctatggagctagctttaaaaaggaacagtaaaaatattaatcggttagctgggtggaatggcccatgcctgtagtcccagctactcaggaggctcagcagcaggacgacttgagcccaagagttccagaccagcctggccaccttagtgagatcccttctcttaaaaataataacttattgccagatttggggcatttggaaagaagttcattgaagataaagcaaaagtaaaaaaaaaaaaaaaaaaaacaaggggaaagggttggttaggcaatcattctagggcagaaagaagtacaggataggaagagcataatacactgtttttctcaacaaggagcagtatgtacacagtcataatgatgtgactgcttagcccctaaatatggtaactactctgggacaatatgggaggaaaagtgaagattgtgatggtgtaagagctaatcctcatctgtcatatccagaaatcactatataatatataataatgaaatgactaagttatgtgaggaaaaaaacagaagacattgctaaaagagttaaaagtcattgctctggagaattaggagggatggggcaggggactgttaggatgcattataaactgaaaagcctttttaaaattttatgtattaatatatgcattcacttgaaaaactaaaaaaaaacaataatttggaaaaacccatgaaggtaactaacggaaggaaaaactaagagaatgaaaagtatttgcctctggaaagaacaactggcaggactgttgttttcattgtaagacttttggagccatttaattgtacttaaccattttcatctatttctttaataagaacaattccatcttaataaagagttacacttgttaata

SEQ ID NO: 505 - protein, 1616 aa, Homo sapiens
MPARTAPARVPTLAVPAISLPDDVRRRLKDLERDSLTEKECVKEKLNLLHEFLQTEIKNQLCDLETKLRKEELSEEGYLAKVKSLLNKDLSLENGAHAYNREVNGRLENGNQARSEARRVGMADANSPPKPLSKPRTPRRSKSDGEAKPEPSPSPRITRKSTRQTTITSHFAKGPAKRKPQEESERAKSDESIKEEDKDQDEKRRRVTSRERVARPLPAEEPERAKSGTRTEKEEERDEKEEKRLRSQTKEPTPKQKLKEEPDREARAGVQADEDEDGDEKDEKKHRSQPKDLAAKRRPEEKEPEKVNPQISDEKDEDEKEEKRRKTTPKEPTEKKMARAKTVMNSKTHPPKCIQCGQYLDDPDLKYGQHPPDAVDEPQMLTNEKLSIFDANESGFESYEALPQHKLTCFSVYCKHGHLCPIDTGLIEKNIELFFSGSAKPIYDDDPSLEGGVNGKNLGPINEWWITGFDGGEKALIGFSTSFAEYILMDPSPEYAPIFGLMQEKIYISKIVVEFLQSNSDSTYEDLINKIETTVPPSGLNLNRFTEDSLLRHAQFVVEQVESYDEAGDSDEQPIFLTPCMRDLIKLAGVTLGQRRAQARRQTIRHSTREKDRGPTKATTTKLVYQIFDTFFAEQIEKDDREDKENAFKRRRCGVCEVCQQPECGKCKACKDMVKFGGSGRSKQACQERRCPNMAMKEADDDEEVDDNIPEMPSPKKMHQGKKKKQNKNRISWVGEAVKTDGKKSYYKKVCIDAETLEVGDCVSVIPDDSSKPLYLARVTALWEDSSNGQMFHAHWFCAGTDTVLGATSDPLELFLVDECEDMQLSYIHSKVKVIYKAPSENWAMEGGMDPESLLEGDDGKTYFYQLWYDQDYARFESPPKTQPTEDNKFKFCVSCARLAEMRQKEIPRVLEQLEDLDSRVLYYSATKNGILYRVGDGVYLPPEAFTFNIKLSSPVKRPRKEPVDEDLYPEHYRKYSDYIKGSNLDAPEPYRIGRIKEIFCPKKSNGRPNETDIKIRVNKFYRPENTHKSTPASYHADINLLYWSDEEAVVDFKAVQGRCTVEYGEDLPECVQVYSMGGPNRFYFLEAYNAKSKSFEDPPNHARSPGNKGKGKGKGKGKPKSQACEPSEPEIEIKLPKLRTLDVFSGCGGLSEGFHQAGISDTLWAIEMWDPAAQAFRLNNPGSTVFTEDCNILLKLVMAGETTNSRGQRLPQKGDVEMLCGGPPCQGFSGMNRFNSRTYSKFKNSLVVSFLSYCDYYRPRFFLLENVRNFVSFKRSMVLKLTLRCLVRMGYQCTFGVLQAGQYGVAQTRRRAIILAAAPGEKLPLFPEPLHVFAPRACQLSVVVDDKKFVSNITRLSSGPFRTITVRDTMSDLPEVRNGASALEISYNGEPQSWFQRQLRGAQYQPILRDHICKDMSALVAARMRHIPLAPGSDWRDLPNIEVRLSDGTMARKLRYTHHDRKNGRSSSGALRGVCSCVEAGKACDPAARQFNTLIPWCLPHTGNRHNHWAGLYGRLEWDGFFSTTVTNPEPMGKQGRVLHPEQHRVVSVRECARSQGFPDTYRLFGNILDKHRQVGNAVPPPLAKAIGLEIKLCMLAKARESASAKIKEEEAAKD

SEQ ID NO: 506 - DNA, 5434 bp, Homo sapiens
cgtccgcgtggggggggtgtgtgcccgccttgcgcatgcgtgttccctgggcatggccggctccgttccatccttctgcacagggtatcgcctctctccgtttggtacatcccctcctcccccacgcccggactggggtggtagacgcgcctccgctcatcgcccctccccatcggtttccgcgcgaaaagccggggcgcctgcgctgccgccgccgcgtctgctgaagcctccgagatgccggcgcgtaccgccccagcccgggtgcccacactggccgtcccggccatctcgctgcccgacgatgtccgcaggcggctcaaagatttggaaagagacagcttaacagaaaaggaatgtgtgaaggagaaattgaatctcttgcacgaatttctgcaaacagaaataaagaatcagttatgtgacttggaaaccaaattacgtaaagaagaattatccgaggagggctacctggctaaagtcaaatcccttttaaataaagatttgtccttggagaacggtgctcatgcttacaaccgggaagtgaatggacgtctagaaaacgggaaccaagcaagaagtgaagcccgtagagtgggaatggcagatgccaacagcccccccaaacccctttccaaacctcgcacgcccaggaggagcaagtccgatggagaggctaagcctgaaccttcacctagccccaggattacaaggaaaagcaccaggcaaaccaccatcacatctcattttgcaaagggccctgccaaacggaaacctcaggaagagtctgaaagagccaaatcggatgagtccatcaaggaagaagacaaagaccaggatgagaagagacgtagagttacatccagagaacgagttgctagaccgcttcctgcagaagaacctgaaagagcaaaatcaggaacgcgcactgaaaaggaagaagaaagagatgaaaaagaagaaaagagactccgaagtcaaaccaaagaaccaacacccaaacagaaactgaaggaggagccggacagagaagccagggcaggcgtgcaggctgacgaggacgaagatggagacgagaaagatgagaagaagcacagaagtcaacccaaagatctagctgccaaacggaggcccgaagaaaaagaacctgaaaaagtaaatccacagatttctgatgaaaaagacgaggatgaaaaggaggagaagagacgcaaaacgacccccaaagaaccaacggagaaaaaaatggctcgcgccaaaacagtcatgaactccaagacccaccctcccaagtgcattcagtgcgggcagtacctggacgaccctgacctcaaatatgggcagcacccaccagacgcggtggatgagccacagatgctgacaaatgagaagctgtccatctttgatgccaacgagtctggctttgagagttatgaggcgcttccccagcacaaactgacctgcttcagtgtgtactgtaagcacggtcacctgtgtcccatcgacaccggcctcatcgagaagaatatcgaactcttcttttctggttcagcaaaaccaatctatgatgatgacccgtctcttgaaggtggtgttaatggcaaaaatcttggccccataaatgaatggtggatcactggctttgatggaggtgaaaaggccctcatcggcttcagcacctcatttgccgaatacattctgatggatcccagtcccgagtatgcgcccatatttgggctgatgcaggagaagatctacatcagcaagattgtggtggagttcctgcagagcaattccgactcgacctatgaggacctgatcaacaagatcgagaccacggttcctccttctggcctcaacttgaaccgcttcacagaggactccctcctgcgacacgcgcagtttgtggtggagcaggtggagagttatgacgaggccggggacagtgatgagcagcccatcttcctgacgccctgcatgcgggacctgatcaagctggctggggtcacgctgggacagaggcgagcccaggcgaggcggcagaccatcaggcattctaccagggagaaggacaggggacccacgaaagccaccaccaccaagctggtctaccagatcttcgatactttcttcgcagagcaaattgaaaaggatgacagagaagacaaggagaacgcctttaagcgccggcgatgtggcgtctgtgaggtgtgtcagcagcctgagtgtgggaaatgtaaagcctgcaaggacatggttaaatttggtggcagtggacggagcaagcaggcttgccaagagcggaggtgtcccaatatggccatgaaggaggcagatgacgatgaggaagtcgatgataacatcccagagatgccgtcacccaaaaaaatgcaccaggggaagaagaagaaacagaacaagaatcgcatctcttgggtcggagaagccgtcaagactgatgggaagaagagttactataagaaggtgtgcattgatgcggaaaccctggaagtgggggactgtgtctctgttattccagatgattcctcaaaaccgctgtatctagcaagggtcacggcgctgtgggaggacagcagcaacgggcagatgtttcacgcccactggttctgcgctgggacagacacagtcctcggggccacgtcggaccctctggagctgttcttggtggatgaatgtgaggacatgcagctttcatatatccacagcaaagtgaaagtcatctacaaagccccctccgaaaactgggccatggagggaggcatggatcccgagtccctgctggagggggacgacgggaagacctacttctaccagctgtggtatgatcaagactacgcgagattcgagtcccctccaaaaacccagccaacagaggacaacaagttcaaattctgtgtgagctgtgcccgtctggctgagatgaggcaaaaagaaatccccagggtcctggagcagctcgaggacctggatagccgggtcctctactactcagccaccaagaacggcatcctgtaccgagttggtgatggtgtgtacctgccccctgaggccttcacgttcaacatcaagctgtccagtcccgtgaaacgcccacggaaggagcccgtggatgaggacctgtacccagagcactaccggaaatactccgactacatcaaaggcagcaacctggatgcccctgagccctaccgaattggccggatcaaagagatcttctgtcccaagaagagcaacggcaggcccaatgagactgacatcaaaatccgggtcaacaagttctacaggcctgagaacacccacaagtccactccagcgagctaccacgcagacatcaacctgctctactggagcgacgaggaggccgtggtggacttcaaggctgtgcagggccgctgcaccgtggagtatggggaggacctgcccgagtgcgtccaggtgtactccatgggcggccccaaccgcttctacttcctcgaggcctataatgcaaagagcaaaagctttgaagatcctcccaaccatgcccgtagccctggaaacaaagggaagggcaagggaaaagggaagggcaagcccaagtcccaagcctgtgagccgagcgagccagagatagagatcaagctgcccaagctgcggaccctggatgtgttttctggctgcggggggttgtcggagggattccaccaagcaggcatctctgacacgctgtgggccatcgagatgtgggaccctgcggcccaggcgttccggctgaacaaccccggctccacagtgttcacagaggactgcaacatcctgctgaagctggtcatggctggggagaccaccaactcccgcggccagcggctgccccagaagggagacgtggagatgctgtgcggcgggccgccctgccagggcttcagcggcatgaaccgcttcaattcgcgcacctactccaagttcaaaaactctctggtggtttccttcctcagctactgcgactactaccggccccggttcttcctcctggagaatgtcaggaactttgtctccttcaagcgctccatggtcctgaagctcaccctccgctgcctggtccgcatgggctatcagtgcaccttcggcgtgctgcaggccggtcagtacggcgtggcccagactaggaggcgggccatcatcctggccgcggcccctggagagaagctccctctgttcccggagccactgcacgtgtttgctccccgggcctgccagctgagcgtggtggtggatgacaagaagtttgtgagcaacataaccaggttgagctcgggtcctttccggaccatcacggtgcgagacacgatgtccgacctgccggaggtgcggaatggagcctcggcactggagatctcctacaacggggagcctcagtcctggttccagaggcagctccggggcgcacagtaccagcccatcctcagggaccacatctgtaaggacatgagtgcattggtggctgcccgcatgcggcacatccccttggccccagggtcagactggcgcgatctgcccaacatcgaggtgcggctctcagacggcaccatggccaggaagctgcggtatacccaccatgacaggaagaacggccgcagcagctctggggccctccgtggggtctgctcctgcgtggaagccggcaaagcctgcgaccccgcagccaggcagttcaacaccctcatcccctggtgcctgccccacaccgggaaccggcacaaccactgggctggcctctatggaaggctcgagtgggacggcttcttcagcacaaccgtcaccaaccccgagcccatgggcaagcagggccgcgtgctccacccagagcagcaccgtgtggtgagcgtgcgggagtgtgcccgctcccagggcttccctgacacctaccggctcttcggcaacatcctggacaagcaccggcaggtgggcaatgccgtgccaccgcccctggccaaagccattggcttggagatcaagctttgtatgttggccaaagcccgagagagtgcctcagctaaaataaaggaggaggaagctgctaaggactagttctgccctcccgtcacccctgtttctggcaccaggaatccccaacatgcactgatgttgtgtttttaacatgtcaatctgtccgttcacatgtgtggtacatggtgtttgtggccttggctgacatgaagctgttgtgtgaggttcgcttatcaactaatgatttagtgatcaaattgtgcagtactttgtgcattctggattttaaaagttttttattatgcattatatcaaatctaccactgtatgagtggaaattaagactttatgtagtttttatatgttgtaatatttcttcaaataaatctctcctataaaccaaaaaaaaaaaaaaaaaaaaaaaaaa

SEQ ID NO: 507 - protein, 107 aa, Homo sapiens
MARAALSAAPSNPRLLRVALLLLLLVAAGRRAAGASVATELRCQCLQTLQGIHPKNIQSVNVKSPGPHCAQTEVIATLKNGRKACLNPASPIVKKIIEKMLNSDKSN

SEQ ID NO: 508 - DNA, 1103 bp, Homo sapiens
cacagagcccgggccgcaggcacctcctcgccagctcttccgctcctctcacagccgccagacccgcctgctgagccccatggcccgcgctgctctctccgccgcccccagcaatccccggctcctgcgagtggcactgctgctcctgctcctggtagccgctggccggcgcgcagcaggagcgtccgtggccactgaactgcgctgccagtgcttgcagaccctgcagggaattcaccccaagaacatccaaagtgtgaacgtgaagtcccccggaccccactgcgcccaaaccgaagtcatagccacactcaagaatgggcggaaagcttgcctcaatcctgcatcccccatagttaagaaaatcatcgaaaagatgctgaacagtgacaaatccaactgaccagaagggaggaggaagctcactggtggctgttcctgaaggaggccctgcccttataggaacagaagaggaaagagagacacagctgcagaggccacctggattgtgcctaatgtgtttgagcatcgcttaggagaagtcttctatttatttatttattcattagttttgaagattctatgttaatattttaggtgtaaaataattaagggtatgattaactctacctgcacactgtcctattatattcattctttttgaaatgtcaaccccaagttagttcaatctggattcatatttaatttgaaggtagaatgttttcaaatgttctccagtcattatgttaatatttctgaggagcctgcaacatgccagccactgtgatagaggctggcggatccaagcaaatggccaatgagatcattgtgaaggcaggggaatgtatgtgcacatctgttttgtaactgtttagatgaatgtcagttgttatttattgaaatgatttcacagtgtgtggtcaacatttctcatgttgaaactttaagaactaaaatgttctaaatatcccttggacattttatgtctttcttgtaaggcatactgccttgtttaatggtagttttacagtgtttctggcttagaacaaaggggcttaattattgatgttttcatagagaatataaaaataaagcacttatag

SEQ ID NO: 509 - protein, 107 aa, Homo sapiens
MARATLSAAPSNPRLLRVALLLLLLVAASRRAAGAPLATELRCQCLQTLQGIHLKNIQSVKVKSPGPHCAQTEVIATLKNGQKACLNPASPMVKKIIEKMLKNGKSN

SEQ ID NO: 510 - DNA, 1110 bp, Homo sapiens
gacagagcccgggccacggagctccttgccagctctcctcctcgcacagccgctcgaaccgcctgctgagccccatggcccgcgccacgctctccgccgcccccagcaatccccggctcctgcgggtggcgctgctgctcctgctcctggtggccgccagccggcgcgcagcaggagcgcccctggccactgaactgcgctgccagtgcttgcagaccctgcagggaattcacctcaagaacatccaaagtgtgaaggtgaagtcccccggaccccactgcgcccaaaccgaagtcatagccacactcaagaatgggcagaaagcttgtctcaaccccgcatcgcccatggttaagaaaatcatcgaaaagatgctgaaaaatggcaaatccaactgaccagaaggaaggaggaagcttattggtggctgttcctgaaggaggccctgccttacaggaacagaagaggaaagagagacacagctgcagaggccacctggcttgcgcctaatgtgtttgagcatacttaggagaagtcttctatttatttatttatttatttatttgtttgttttagaagattctatgttaatattttatgtgtaaaataaggttatgattgaatctacttgcacactctcccattatatttattgtttattttaggtcaaacccaagttagttcaatcctgattcatatttaatttgaagatagaaggtttgcagatattctctagtcatttgttaatatttcttcgtgatgacatatcacatgtcagccactgtgatagaggctgaggaatccaagaaaatggccagtaagatcaatgtgacggcagggaaatgtatgtgtgtctattttgtaactgtaaagatgaatgtcagttgttatttattgaaatgatttcacagtgtgtggtcaacatttctcatgttgaagctttaagaactaaaatgttctaaatatcccttggcattttatgtctttcttgtaagatactgccttgtttaatgttaattatgcagtgtttccctctgtgttagagcagagaggtttcgatatttattgatgttttcacaaagaacaggaaaataaaatatttaaaaatat

SEQ ID NO: 511 - protein, 99 aa, Homo sapiens
MTSKLAVALLAAFLISAALCEGAVLPRSAKELRCQCIKTYSKPFHPKFIKELRVIESGPHCANTEIIVKLSDGRELCLDPKENWVQRVVEKFLKRAENS

SEQ ID NO: 512 - DNA, 1666 bp, Homo sapiens
ctccataaggcacaaactttcagagacagcagagcacacaagcttctaggacaagagccaggaagaaaccaccggaaggaaccatctcactgtgtgtaaacatgacttccaagctggccgtggctctcttggcagccttcctgatttctgcagctctgtgtgaaggtgcagttttgccaaggagtgctaaagaacttagatgtcagtgcataaagacatactccaaacctttccaccccaaatttatcaaagaactgagagtgattgagagtggaccacactgcgccaacacagaaattattgtaaagctttctgatggaagagagctctgtctggaccccaaggaaaactgggtgcagagggttgtggagaagtttttgaagagggctgagaattcataaaaaaattcattctctgtggtatccaagaatcagtgaagatgccagtgaaacttcaagcaaatctacttcaacacttcatgtattgtgtgggtctgttgtagggttgccagatgcaatacaagattcctggttaaatttgaatttcagtaaacaatgaatagtttttcattgtaccatgaaatatccagaacatacttatatgtaaagtattatttatttgaatctacaaaaaacaacaaataatttttaaatataaggattttcctagatattgcacgggagaatatacaaatagcaaaattgaggccaagggccaagagaatatccgaactttaatttcaggaattgaatgggtttgctagaatgtgatatttgaagcatcacataaaaatgatgggacaataaattttgccataaagtcaaatttagctggaaatcctggatttttttctgttaaatctggcaaccctagtctgctagccaggatccacaagtccttgttccactgtgccttggtttctcctttatttctaagtggaaaaagtattagccaccatcttacctcacagtgatgttgtgaggacatgtggaagcactttaagttttttcatcataacataaattattttcaagtgtaacttattaacctatttattatttatgtatttatttaagcatcaaatatttgtgcaagaatttggaaaaatagaagatgaatcattgattgaatagttataaagatgttatagtaaatttattttattttagatattaaatgatgttttattagataaatttcaatcagggtttttagattaaacaaacaaacaattgggtacccagttaaattttcatttcagataaacaacaaataattttttagtataagtacattattgtttatctgaaattttaattgaactaacaatcctagtttgatactcccagtcttgtcattgccagctgtgttggtagtgctgtgttgaattacggaataatgagttagaactattaaaacagccaaaactccacagtcaatattagtaatttcttgctggttgaaacttgtttattatgtacaaatagattcttataatattatttaaatgactgcatttttaaatacaaggctttatatttttaactttaagatgtttttatgtgctctccaaattttttttactgtttctgattgtatggaaatataaaagtaaatatgaaacatttaaaatataatttgttgtcaaagtaaaaaaaaaaaaaaa

SEQ ID NO: 513 - protein, 106 aa, Homo sapiens
MAHATLSAAPSNPRLLRVALLLLLLVGSRRAAGASVVTELRCQCLQTLQGIHLKNIQSVNVRSPGPHCAQTEVIATLKNGKKACLNPASPMVQKIIEKILNKGSTN

SEQ ID NO: 514 - DNA, 1064 bp, Homo sapiens
  misc_feature (27)...(27): N=A, T, G, or C
cacagccgggtcgcaggcacctccccngccagctctcccgcattctgcacagcttcccgacgcgtctgctgagccccatggcccacgccacgctctccgccgcccccagcaatccccggctcctgcgggtggcgctgctgctcctgctcctggtgggcagccggcgcgcagcaggagcgtccgtggtcactgaactgcgctgccagtgcttgcagacactgcagggaattcacctcaagaacatccaaagtgtgaatgtaaggtcccccggaccccactgcgcccaaaccgaagtcatagccacactcaagaatgggaagaaagcttgtctcaaccccgcatcccccatggttcagaaaatcatcgaaaagatactgaacaaggggagcaccaactgacaggagagaagtaagaagcttatcagcgtatcattgacacttcctgcagggtggtccctgcccttaccagagctgaaaatgaaaaagagaacagcagctttctagggacagctggaaagggacttaatgtgtttgactatttcttacgagggttctacttatttatgtatttatttttgaaagcttgtattttaatattttacatgctgttatttaaagatgtgagtgtgtttcatcaaacatagctcagtcctgattatttaattggaatatgatgggttttaaatgtgtcattaaactaatatttagtgggagaccataatgtgtcagccaccttgataaatgacagggtggggaactggagggtngggggattgaaatgcaagcaattagtggatcactgttagggtaagggaatgtatgtacacatctattttttatacttttttttttaaaaaagaatgtcagttgttatttattcaaattatctcacattatgtgttcaacatttttatgctgaagtttcccttagacattttatgtcttgcttgtagggcataatgccttgtttaatgtccattctgcagcgtttctctttcccttggaaaagagaatttatcattactgttacatttgtacaaatgacatgataataaaagttttatg

SEQ ID NO: 515 - protein, 99 aa, Homo sapiens
MKVSAALLCLLLIAATFIPQGLAQPDAINAPVTCCYNFTNRKISVQRLASYRRITSSKCPKEAVIFKTIVAKEICADPKQKWVQDSMDHLDKQTQTPKT

SEQ ID NO: 516 - DNA, 757 bp, Homo sapiens
ggaaccgagaggctgagactaacccagaaacatccaattctcaaactgaagctcgcactctcgcctccagcatgaaagtctctgccgcccttctgtgcctgctgctcatagcagccaccttcattccccaagggctcgctcagccagatgcaatcaatgccccagtcacctgctgttataacttcaccaataggaagatctcagtgcagaggctcgcgagctatagaagaatcaccagcagcaagtgtcccaaagaagctgtgatcttcaagaccattgtggccaaggagatctgtgctgaccccaagcagaagtgggttcaggattccatggaccacctggacaagcaaacccaaactccgaagacttgaacactcactccacaacccaagaatctgcagctaacttattttcccctagctttccccagacaccctgttttattttattataatgaattttgtttgttgatgtgaaacattatgccttaagtaatgttaattcttatttaagttattgatgttttaagtttatctttcatggtactagtgttttttagatacagagacttggggaaattgcttttcctcttgaaccacagttctacccctgggatgttttgagggtctttgcaagaatcattaatacaaagaattttttttaacattccaatgcattgctaaaatattattgtggaaatgaatattttgtaactattacaccaaataaatatatttttgtacaaaaaaaaaaaaaa

SEQ ID NO: 517 - protein, 415 aa, Homo sapiens
MELRKYGPGRLAGTVIGGAAQSKSQTKSDSITKEFLPGLYTAPSSPFPPSQVSDHQVLNDAEVAALLENFSSSYDYGENESDSCCTSPPCPQDFSLINFDRAFLPALYSLLFLLGLLGNGAVAAVLLSRRTALSSTDTFLLHLAVADTLLVLTLPLWAVDAAVQWVFGSGLCKVAGALFNINFYAGALLLACISFDRYLNIVHATQLYRRGPPARVTLTCLAVWGLCLLFALPDFIFLSAHHDERLNATHCQYNFPQVGRTALRVLQLVAGFLLPLLVMAYCYAHILAVLLVSRGQRRLRAMRLVVVVVVAFALCWTPYHLVVLVDILMDLGALARNCGRESRVDAKSVTSGLGYMHCCLNPLLYAFVGVKFRERMWMLLLRLGCPNQRGLQRQPSSSRRDSSWSETSEASYSGL

SEQ ID NO: 518 - DNA, 1703 bp, Homo sapiens
atggagttgaggaagtacggccctggaagactggcggggacagttataggaggagctgctcagagtaaatcacagactaaatcagactcaatcacaaaagagttcctgccaggcctttacacagccccttcctccccgttcccgccctcacaggtgagtgaccaccaagtgctaaatgacgccgaggttgccgccctcctggagaacttcagctcttcctatgactatggagaaaacgagagtgactcgtgctgtacctccccgccctgcccacaggacttcagcctgaacttcgaccgggccttcctgccagccctctacagcctcctctttctgctggggctgctgggcaacggcgcggtggcagccgtgctgctgagccggcggacagccctgagcagcaccgacaccttcctgctccacctagctgtagcagacacgctgctggtgctgacactgccgctctgggcagtggacgctgccgtccagtgggtctttggctctggcctctgcaaagtggcaggtgccctcttcaacatcaacttctacgcaggagccctcctgctggcctgcatcagctttgaccgctacctgaacatagttcatgccacccagctctaccgccgggggcccccggcccgcgtgaccctcacctgcctggctgtctgggggctctgcctgcttttcgccctcccagacttcatcttcctgtcggcccaccacgacgagcgcctcaacgccacccactgccaatacaacttcccacaggtgggccgcacggctctgcgggtgctgcagctggtggctggctttctgctgcccctgctggtcatggcctactgctatgcccacatcctggccgtgctgctggtttccaggggccagcggcgcctgcgggccatgcggctggtggtggtggtcgtggtggcctttgccctctgctggaccccctatcacctggtggtgctggtggacatcctcatggacctgggcgctttggcccgcaactgtggccgagaaagcagggtagacgtggccaagtcggtcacctcaggcctgggctacatgcactgctgcctcaacccgctgctctatgcctttgtaggggtcaagttccgggagcggatgtggatgctgctcttgcgcctgggctgccccaaccagagagggctccagaggcagccatcgtcttcccgccgggattcatcctggtctgagacctcagaggcctcctactcgggcttgtgaggccggaatccgggctcccctttcgcccacagtctgacttccccgcattccaggctcctccctccctctgccggctctggctctccccaatatcctcgctcccgggactcactggcagccccagcaccaccaggtctcccgggaagccaccctcccagctctgaggactgcaccattgctgctccttagctgccaagccccatcctgccgcccgaggtggctgcctggagccccactgcccttctcatttggaaactaaaacttcatcttccccaagtgcggggagtacaaggcatggcgtagagggtgctgccccatgaagccacagcccaggcctccagctcagcagtgactgtggccatggtccccaagacctctatatttgctcttttatttttatgtctaaaatcctgcttaaaacttttcaataaacaagatcgtcaggaccaaaaaaa

SEQ ID NO: 519 - DNA, 60 bp, Artificial Sequence
  Aligent oligonucleotide
gtactttgtgtttaatatatctgggtgatggatcacaacacatcaataaactgacttacc

SEQ ID NO: 520 - DNA, 60 bp, Artificial Sequence
  synthetic sequence
atttacttgcatatgtaaaccattgctgtgccattcaatgtttgatgcataattggacct

SEQ ID NO: 521 - DNA, 60 bp, Artificial Sequence
  synthetic sequence
agatggaggaagcatctgagtttgagaccatggctgttacagggatcatgtaaacttgct

SEQ ID NO: 522 - DNA, 60 bp, Artificial Sequence
  synthetic sequence
tggagatttaaacactgaggtttctgttcaaactgtgagttctgttctttgtgagaaatt

SEQ ID NO: 523 - DNA, 60 bp, Artificial Sequence
  synthetic sequence
tgtacctgaaaaatgggaagagtcgggaccacagtttattaccaattctgaggaagtccg

SEQ ID NO: 524 - DNA, 60 bp, Artificial Sequence
  synthetic sequence
atccatttactcagctggagaggagacatcaagaacatgccagacacatttcttttggtg

SEQ ID NO: 525 - DNA, 60 bp, Artificial Sequence
  synthetic sequence
ctggatgttgaattgccacctgtttgctgtgacatagatatttaaatttcttagtgcttc

SEQ ID NO: 526 - DNA, 60 bp, Artificial Sequence
  synthetic sequence
ctggaaacctctggaggtcatctcggctgttcctgagaaataaaaagcctgtcatttcaa

SEQ ID NO: 527 - DNA, 60 bp, Artificial Sequence
  synthetic sequence
tgttgcagtctcctttaagcattctgttgaccctggatgttgaattgccacctgtttgct

SEQ ID NO: 528 - DNA, 60 bp, Artificial Sequence
  synthetic sequence
actatttcttcagagtttgtcatatactgcttgtcatctgcatgtctactcagcatttga

SEQ ID NO: 529 - DNA, 60 bp, Artificial Sequence
  synthetic sequence
agactgttaaaacaaaaagttctgttcctgcctcagatgacgcctatccagaaatagaaa

SEQ ID NO: 530 - DNA, 1863 bp, Homo sapiens
gtgcagcctgatgcgcaacgtggggactcaggcgcgctgggcggcaggagttgcttccggccgtgttggtggtctgaattgagaagccgcgactaagggaagatggagacaatactggagcagcagcggcgctatcatgaggagaaggaacggctcatggacgtcatggctaaagagatgctcaccaagaagtccacgctccgggaccagatcaattctgatcaccgcactcgggccatgcaagataggtatatggaggtcagtgggaacctgagggatttgtatgatgataaggatggattacgaaaggaggagctcaatgccatttcaggacccaatgagtttgctgaattctataatagactcaagcaaataaaggaattccaccggaagcacccaaatgagatctgtgtgccaatgtcagtggaatttgaggaactcctgaaggctcgagagaatccaagtgaagaggcacaaaacttggtggagttcacagatgaggagggatatggtcgttatctcgatctccatgactgttacctcaagtacattaacctgaaggcatctgagaagctggattatatcacatacctgtccatctttgaccaattatttgacattcctaaagaaaggaagaatgcagagtataagagatacctagagatgctgcttgagtaccttcaggattacacagatagagtgaagcctctccaagatcagaatgaactttttgggaagattcaggctgagtttgagaagaaatgggagaatgggacctttcctggatggccgaaagagacaagcagtgccctgacccatgctggagcccatcttgacctctctgcattctcctcctgggaggagttggcttctctgggtttggacagattgaaatctgctctcttagctttaggcttgaaatgtggcgggaccctagaagagcgagcccagagactattcagtaccaaaggaaagtccctggagtcacttgatacctctttgtttgccaaaaatcccaagtcaaagggcaccaagcgagacactgaaaggaacaaagacattgcttttctagaagcccagatctatgaatatgtagagattctcggggaacagcgacatctcactcatgaaaatgtacagcgcaagcaagccaggacaggagaagagcgagaagaagaggaagaagagcagatcagtgagagtgagagtgaagatgaagagaacgagatcatttacaaccccaaaaacctgccacttggctgggatggcaaacctattccctactggctgtataagcttcatggcctaaatatcaactacaactgtgagatttgtggaaactacacctaccgagggcccaaagccttccagcgacactttgctgaatggcgtcatgctcatggcatgaggtgtttgggcatcccaaacactgctcactttgctaatgtgacacagattgaagatgctgtctccttgtgggccaaactgaaattgcagaaggcttcagaacgatggcagcctgacactgaggaagaatatgaagactcaagtgggaatgttgtgaataagaagacatacgaggatctgaaaagacaaggactgctctagtgttgagggatgtagctcagcttttgggctagcccaggcttccctaagatctgctttttctatttctcccaaccaaatcctcttaaagaccctttgctatgtagtctcatggtctagcatgcatcttgtagaaacaaggcatgctggcagattgcagggttgagatgtgttttatctgttttatattttaaaagattctgccagaaaataaaaccagaccttgttctaaaaaaaaaaaaaaaaaaaaaaaaaaaa

SEQ ID NO: 531 - protein, 501 aa, Homo sapiens
METILEQQRRYHEEKERLMDVMAKEMLTKKSTLRDQINSDHRTRAMQDRYMEVSGNLRDLYDDKDGLRKEELNAISGPNEFAEFYNRLKQIKEFHRKHPNEICVPMSVEFEELLKARENPSEEAQNLVEFTDEEGYGRYLDLHDCYLKYINLKASEKLDYITYLSIFDQLFDIPKERKNAEYKRYLEMLLEYLQDYTDRVKPLQDQNELFGKIQAEFEKKWENGTFPGWPKETSSALTHAGAHLDLSAFSSWEELASLGLDRLKSALLALGLKCGGTLEERAQRLFSTKGKSLESLDTSLFAKNPKSKGTKRDTERNKDIAFLEAQIYEYVEILGEQRHLTHENVQRKQARTGEEREEEEEEQISESESEDEENEIIYNPKNLPLGWDGKPIPYWLYKLHGLNINYNCEICGNYTYRGPKAFQRHFAEWRHAHGMRCLGIPNTAHFANVTQIEDAVSLWAKLKLQKASERWQPDTEEEYEDSSGNVVNKKTYEDLKRQGLL

SEQ ID NO: 532 - DNA, 3326 bp, Homo sapiens
ctgagcctcccgtgccggccggccggccgggggaacaggcgggcgctcggggggcgctcggggggcggggggagttccggttccggttctttgtgcggctgcatcggcggctccgggaagatggcggcccgggcgggtttccagtctgtggctccaagcggcggcgccggagcctcaggaggggcgggcgcggctgctgccttgggcccgggcggaactccggggcctcctgtgcgaatgggcccggctccgggtcaagggctgtaccgctccccgatgcccggagcggcctatccgagaccaggtatgttgccaggcagccgaatgacacctcagggaccttccatgggaccccctggctatggggggaacccttcagtccgacctggcctggcccagtcagggatggatcagtcccgcaagagacctgcccctcagcagatccagcaggtccagcagcaggcggtccaaaatcgaaaccacaatgcaaagaaaaagaagatggctgacaaaattctacctcaaaggattcgtgaactggtaccagaatcccaggcctatatggatctcttggcttttgaaaggaaactggaccagactatcatgaggaaacggctagatatccaagaggccttgaaacgtcccatcaagcaaaaacggaagctgcgaattttcatttctaacactttcaatccggctaagtcagatgccgaggatggggaagggacggtggcttcctgggagcttcgggtagaaggacggctcctggaggattcagccttgtccaaatatgatgccactaaacaaaagaggaagttctcttccttttttaagtccttggtgattgaactggacaaagacctgtatgggccagacaaccatctggtagaatggcacaggaccgccactacccaggagaccgatggctttcaggtgaagcggccgggagacgtgaatgtacggtgtactgtcctactgatgctggattaccagcctccccagtttaaattagacccccgcctagctcgactcctgggcatccatacccagactcgtccagtgatcatccaagcactgtggcaatatattaagacacataagctccaggaccctcacgagcgggagtttgtcatctgtgacaagtacctgcagcagatctttgagtctcaacgtatgaagttttcagagatccctcagcggctccatgccttgcttatgccaccagaacctatcatcattaatcatgtcatcagtgttgacccgaatgatcagaaaaagacagcttgttatgacattgatgttgaagtggatgacaccttgaagacccagatgaattcttttctgctgtccactgccagccaacaggagattgctactctagacaacaagatccatgagacaatagaaaccatcaaccagctgaagactcagcgggagttcatgctgagctttgccagagaccctcagggtttcatcaatgactggcttcagtcccagtgcagggacctcaagacaatgactgatgtggtgggtaacccagaggaggagcgccgagctgagttctacttccagccctgggctcaggaggctgtgtgccgatacttctactccaaggtgcagcagagacgacaagaattagagcaagccctgggaatccggaatacatagggcctctcccacagccctgattcgactgcaccaattcttgatttgggccctgtgctgcctgcctcatagtatctgccttggtcttgcttggggcgttccaggggatgctgttggttcaaggacaacaccagaatgaagagggtctcacaagacacctgttatcctcttctttcaccctatctcttcccacccccagcttccctttgccccacaaagttcccatgtgcctgtaccctcccctggtctacataggacctctagatagtgttagagagagaacatgtagtggtaatgagtgcttggaatggattgggcctcaggccaggtggtcttcaaggggaccagctaactgatcctgcccttcagagacccaggagttgggagctttcgctccttctccaagactcaggcctgtgggcactctataagctagttgatcttggctctcctgataacagaatccaatttccttccttccctccacaggtttggaacaaactctcccttcacttgttgccctgtagcactacagaaaccctggttcttgggctccactgagccccaggtcagtccccagccctctgggttggcctgctgtcagtgcttctctcactccttagttggggtccacatcagtattggagttttgttctttattgctccctcccagacactccctgtggctgccctttgtgattccctcagatctgccctaatcccgggcatttgggtgggggaatcttgcctttccctttcagagccccagggatctcatctggggaactgtcattgccagcagaggctgttccttcctgctgtttggagatgtgactcattcattcactcactccaccctgcctctgcatcccttaatggagaaacgggcctaaaaccaaacgggtaaaaagccctgggccatccctgtcttcctgtcccttgtctgcccagttgacacctactggtgacttctagggcactgaggagtgaaagcgcctagggctggagaatagcgctgagttgggtttgtgactcttccctctccctgcctcacaggattgtgactccccagcccctgccctcaaagcttcagacccctcaggtagcagcaggaccttgtgatcttggccccttggatctgagatggtttttgcatctttccaggagagcctcacattcttcttccaggttgtatcacccccgagttagcatatcccaggctcgcagactcaacacagcaagggtgggagacagctgggcacaaagggggaattccgttcagcatgggctctaaacccacagaactgacaaagcccctgcttccccaccccctcctcaggctcctgcgagcacacccccacccccaaatccctccctgttctacactggggacagcagaattttctccccgtcttccccttcctgccattttccctcccttgaaaggttgacactggacaaccttggggcagctgagccctggccgcctcctggctggaaccatgagaaggaagctcagtacttcccacagtgtccctgttgataactgtttttattaactgaattgtttttttcatggaccaaacttttttttgtactgtccccttattgatgttacccagttttaataaaagaatcttctgaaaaaaaaaaaaaaaaaa

SEQ ID NO: 533 - protein, 515 aa, Homo sapiens
MAARAGFQSVAPSGGAGASGGAGAAAALGPGGTPGPPVRMGPAPGQGLYRSPMPGAAYPRPGMLPGSRMTPQGPSMGPPGYGGNPSVRPGLAQSGMDQSRKRPAPQQIQQVQQQAVQNRNHNAKKKKMADKILPQRIRELVPESQAYMDLLAFERKLDQTIMRKRLDIQEALKRPIKQKRKLRIFISNTFNPAKSDAEDGEGTVASWELRVEGRLLEDSALSKYDATKQKRKFSSFFKSLVIELDKDLYGPDNHLVEWHRTATTQETDGFQVKRPGDVNVRCTVLLMLDYQPPQFKLDPRLARLLGIHTQTRPVIIQALWQYIKTHKLQDPHEREFVICDKYLQQIFESQRMKFSEIPQRLHALLMPPEPIIINHVISVDPNDQKKTACYDIDVEVDDTLKTQMNSFLLSTASQQEIATLDNKIHETIETINQLKTQREFMLSFARDPQGFINDWLQSQCRDLKTMTDVVGNPEEERRAEFYFQPWAQEAVCRYFYSKVQQRRQELEQALGIRNT

SEQ ID NO: 534 - DNA, 1662 bp, Homo sapiens
gttaaagccggtcggaactgctccggagggcacgggctccgtaggcaccaactgcaaggacccctccccctgcgggcgctcccatggcacagttcgcgttcgagagtgacctgcactcgctgcttcagctggatgcacccatccccaatgcaccccctgcgcgctggcagcgcaaagccaaggaagccgcaggcccggccccctcacccatgcgggccgccaaccgatcccacagcgccggcaggactccgggccgaactcctggcaaatccagttccaaggttcagaccactcctagcaaacctggcggtgaccgctatatcccccatcgcagtgctgcccagatggaggtggccagcttcctcctgagcaaggagaaccagcctgaaaacagccagacgcccaccaagaaggaacatcagaaagcctgggctttgaacctgaacggttttgatgtagaggaagccaagatccttcggctcagtggaaaaccacaaaatgcgccagagggttatcagaacagactgaaagtactctacagccaaaaggccactcctggctccagccggaagacctgccgttacattccttccctgccagaccgtatcctggatgcgcctgaaatccgaaatgactattacctgaaccttgtggattggagttctgggaatgtactggccgtggcactggacaacagtgtgtacctgtggagtgcaagctctggtgacatcctgcagcttttgcaaatggagcagcctggggaatatatatcctctgtggcctggatcaaagagggcaactacttggctgtgggcaccagcagtgctgaggtgcagctatgggatgtgcagcagcagaaacggcttcgaaatatgaccagtcactctgcccgagtgggctccctaagctggaacagctatatcctgtccagtggttcacgttctggccacatccaccaccatgatgttcgggtagcagaacaccatgtggccacactgagtggccacagccaggaagtgtgtgggctgcgctgggccccagatggacgacatttggccagtggtggtaatgataacttggtcaatgtgtggcctagtgctcctggagagggtggctgggttcctctgcagacattcacccagcatcaaggggctgtcaaggccgtagcatggtgtccctggcagtccaatgtcctggcaacaggagggggcaccagtgatcgacacattcgcatctggaatgtgtgctctggggcctgtctgagtgccgtggatgcccattcccaggtgtgctccatcctctggtctccccattacaaggagctcatctcaggccatggctttgcacagaaccagctagttatttggaagtacccaaccatggccaaggtggctgaactcaaaggtcacacatcccgggtcctgagtctgaccatgagcccagatggggccacagtggcatccgcagcagcagatgagaccctgaggctatggcgctgttttgagttggaccctgcgcggcggcgggagcgggagaaggccagtgcagccaaaagcagcctcatccaccaaggcatccgctgaagaccaacccatcacctcagttgttttttatttttctaataaagtcatgtctcccttcaaaaaaaaaaaaaaaaaaaaa

SEQ ID NO: 535 - protein, 499 aa, Homo sapiens
MAQFAFESDLHSLLQLDAPIPNAPPARWQRKAKEAAGPAPSPMRAANRSHSAGRTPGRTPGKSSSKVQTTPSKPGGDRYIPHRSAAQMEVASFLLSKENQPENSQTPTKKEHQKAWALNLNGFDVEEAKILRLSGKPQNAPEGYQNRLKVLYSQKATPGSSRKTCRYIPSLPDRILDAPEIRNDYYLNLVDWSSGNVLAVALDNSVYLWSASSGDILQLLQMEQPGEYISSVAWIKEGNYLAVGTSSAEVQLWDVQQQKRLRNMTSHSARVGSLSWNSYILSSGSRSGHIHHHDVRVAEHHVATLSGHSQEVCGLRWAPDGRHLASGGNDNLVNVWPSAPGEGGWVPLQTFTQHQGAVKAVAWCPWQSNVLATGGGTSDRHIRIWNVCSGACLSAVDAHSQVCSILWSPHYKELISGHGFAQNQLVIWKYPTMAKVAELKGHTSRVLSLTMSPDGATVASAAADETLRLWRCFELDPARRREREKASAAKSSLIHQGIR

What is claimed is:

1. A method of modulating expression of a THAP responsive gene, said method comprising modulating the interaction of a THAP-family polypeptide or a biologically active fragment thereof with a nucleic acid, thereby enhancing or repressing expression of said THAP responsive gene.

2. The method of claim 1, wherein said THAP-family polypeptide is THAP1.

3. The method of claim 1, wherein said nucleic acid is a THAP responsive promoter.

4. The method of claim 3, wherein said THAP responsive promoter comprises a THAP responsive element.

5. The method of claim 4, wherein said THAP responsive element is a DR-5 element.

6. The method of claim 4, wherein said THAP responsive element is an ER-11 element.

7. The method of claim 4, wherein said THAP responsive element is THRE.

8. The method of claim 3, wherein said THAP responsive promoter does not comprise a THAP responsive element.

9. The method of claim 8, wherein said THAP responsive promoter is modulated by a product of a gene that is under the control of a promoter which comprises a THAP responsive element.

10. The method of claim 1, wherein said THAP responsive gene is selected from the group consisting of Survivin, PTTG1/Securin, PTTG2/Securin, PTTG3/Securin, CKS1, MAD2L1, USP16/Ubp-M, HMMR/RHAMM, KIAA0008/HURP, CDCA7/JPO1 and THAP1.

11. The method of claim 1, wherein said THAP responsive gene encodes a polypeptide involved in the G2 or M phase of the cell cycle.

12. The method of claim 1, wherein said THAP responsive gene encodes a polypeptide involved in the S phase of the cell cycle.

13. The method of claim 12, wherein said THAP responsive gene encodes a polypeptide involved in DNA replication.

14. The method of claim 12, wherein said THAP responsive gene encodes a polypeptide involved in DNA repair.

15. The method of claim 1, wherein said THAP responsive gene encodes a polypeptide involved in RNA splicing.

16. The method of claim 1, wherein said THAP responsive gene encodes a polypeptide involved in apoptosis.

17. The method of claim 1, wherein said THAP responsive gene encodes a polypeptide involved in angiogenesis.

18. The method of claim 1, wherein said THAP responsive gene encodes a polypeptide involved in the proliferation of cancer cells.

19. The method of claim 1, wherein said THAP responsive gene encodes a polypeptide involved in inflammatory disease.

20. A method of modulating the expression of a gene responsive to a THAP/chemokine complex, said method comprising modulating the interaction of a chemokine with a THAP-family polypeptide or a biologically active fragment thereof, thereby enhancing or repressing expression of said gene.

21. The method of claim 20, wherein said THAP-family polypeptide is THAP1.

22. The method of claim 20, wherein said chemokine is selected from the group consisting of SLC, CCL19, CCL5, CXCL11, CXCL10 and CXCL9.

23. The method of claim 20, wherein said chemokine is SLC.

24. The method of claim 20, wherein said chemokine is CXCL9.

25. The method of claim 20, wherein the interaction between said chemokine and said THAP-family polypeptide is modulated by providing a THAP-type chemokine-binding agent.

26. The method of claim 25, wherein said THAP-type chemokine-binding agent comprises a polypeptide selected from the group consisting of a THAP1 polypeptide, an chemokine-binding domain of a THAP1 polypeptide, a THAP1 polypeptide oligomer, an oligomer comprising a THAP1 chemokine-binding domain, a THAP1 polypeptide-immunoglobulin fusion, a THAP1 chemokine-binding domain-immunoglobulin fusion and polypeptide homologs of any one of the aforementioned polypeptides.

27. The method of claim 26, wherein said chemokine-binding domain is an SLC-binding domain.

28. The method of claim 26, wherein said chemokine-binding domain is a CXCL9-binding domain.

29. The method of claim 20, wherein said gene encodes a polypeptide involved in the G2 or M phase of the cell cycle.

30. The method of claim 20, wherein said gene encodes a polypeptide involved in the S phase of the cell cycle.

31. The method of claim 30, wherein said gene encodes a polypeptide involved in DNA replication.

32. The method of claim 30, wherein said gene encodes a polypeptide involved in DNA repair.

33. The method of claim 20, wherein said gene encodes a polypeptide involved in RNA splicing.

34. The method of claim 20, wherein said gene encodes a polypeptide involved in apoptosis.

35. The method of claim 20, wherein said gene encodes a polypeptide involved in angiogenesis.

36. The method of claim 20, wherein said gene encodes a polypeptide involved in the proliferation of cancer cells.

37. The method of claim 20, wherein said gene encodes a polypeptide involved in inflammatory disease.

38. A method of modulating the expression of a gene responsive to a THAP/chemokine complex, said method comprising modulating the interaction of a THAP/chemokine complex with a nucleic acid, thereby enhancing or repressing expression of said gene.

39. The method of claim 38, wherein said THAP-family polypeptide is THAP1.

40. The method of claim 38, wherein said chemokine is selected from the group consisting of SLC, CCL19, CCL5, CXCL11, CXCL10 and CXCL9.

41. The method of claim 38, wherein said chemokine is SLC.

42. The method of claim 38, wherein said chemokine is CXCL9.

43. The method of claim 38, wherein said gene encodes a polypeptide involved in the G2 or M phase of the cell cycle.

44. The method of claim 38, wherein said gene encodes a polypeptide involved in the S phase of the cell cycle.

45. The method of claim 44, wherein said gene encodes a polypeptide involved in DNA replication.

46. The method of claim 44, wherein said gene encodes a polypeptide involved in DNA repair.

47. The method of claim 38, wherein said gene encodes a polypeptide involved in RNA splicing.

48. The method of claim 38, wherein said gene encodes a polypeptide involved in apoptosis.

49. The method of claim 38, wherein said gene encodes a polypeptide involved in angiogenesis.

50. The method of claim 38, wherein said gene encodes a polypeptide involved in the proliferation of cancer cells.

51. The method of claim 38, wherein said gene encodes a polypeptide involved in inflammatory disease.

52. The method of claim 38, wherein said nucleic acid is a THAP responsive promoter.

53. The method of claim 52, wherein said THAP responsive promoter comprises a THAP responsive element.

54. The method of claim 53, wherein said THAP responsive element is a DR-5 element.

55. The method of claim 53, wherein said THAP responsive element is an ER-11 element.

56. The method of claim 53, wherein said THAP responsive element is THRE.

57. The method of claim 52, wherein said THAP responsive promoter does not comprise a THAP responsive element.

58. The method of claim 57, wherein said THAP responsive promoter is modulated by a product of a gene that is under the control of a promoter which comprises a THAP responsive element.

59. A pharmaceutical composition comprising a THAP responsive element in a pharmaceutically acceptable carrier.

60. The pharmaceutical composition of claim 59, wherein said THAP responsive element is a DR-5 element.

61. The pharmaceutical composition of claim 59, wherein said THAP responsive element is an ER-11 element.

62. The pharmaceutical composition of claim 59, wherein said THAP responsive element is an THRE.

63. A transcription factor decoy consisting essentially of a THAP responsive element.

64. The transcription factor decoy of claim 63, wherein said THAP responsive element is a DR-5 element.

65. The transcription factor decoy of claim 63, wherein said THAP responsive element is a ER-11 element.

66. The transcription factor decoy of claim 63, wherein said THAP responsive element is a THRE element.

67. A cell comprising a transcription factor decoy of claim 63.

68. A method of modulating the interaction between a nucleic acid and a THAP-family polypeptide or a biologically active fragment thereof, said method comprising providing a transcription factor decoy which comprises a THAP responsive element, thereby modulating the interaction between said nucleic acid and said THAP-family polypeptide or a biologically active fragment thereof.

69. The method of claim 68, wherein said THAP-family polypeptide is THAP1.

70. The method of claim 68, wherein said THAP responsive element is a DR-5 element.

71. The method of claim 68, wherein said THAP responsive element is an ER-11 element.

72. The method of claim 68, wherein said THAP responsive element is THRE.

73. A method of modulating the interaction between a nucleic acid and a THAP/chemokine complex, said method comprising providing a transcription factor decoy which comprises a THAP responsive element, thereby modulating the interaction between said nucleic acid and said THAP/chemokine complex.

74. The method of claim 73, wherein said THAP-family polypeptide is THAP1.

75. The method of claim 73, wherein said chemokine is selected from the group consisting of SLC, CCL19, CCL5, CXCL11, CXCL10 and CXCL9.

76. The method of claim 73, wherein said chemokine is SLC.

77. The method of claim 73, wherein said chemokine is CXCL9.

78. The method of claim 73, wherein said THAP responsive element is a DR-5 element.

79. The method of claim 73, wherein said THAP responsive element is an ER-11 element.

80. The method of claim 73, wherein said THAP responsive element is THRE.

81. A vector packaging cell line comprising a cell comprising a viral vector which comprises a promoter operably linked to a nucleic acid encoding a THAP-family polypeptide or a biologically active fragment thereof.

82. The cell line of claim 81, wherein said cell further comprises an introduced nucleic acid construct comprising a nucleic acid encoding a chemokine operably linked to a promoter.

83. The cell line of claim 82, wherein said chemokine-encoding construct is included on the same vector as said nucleic acid encoding said THAP-family polypeptide or biologically active fragment thereof.

84. The cell line of claim 82, wherein said nucleic acid encoding said chemokine encodes a chemokine selected from the group consisting of SLC, CCL19, CCL5, CXCL11, CXCL10 and CXCL9.

85. The cell line of claim 82, wherein said nucleic acid encoding said chemokine encodes SLC.

86. The cell line of claim 82, wherein said nucleic acid encoding said chemokine encodes CXCL9.

87. The cell line of claim 81, wherein said THAP-family polypeptide is THAP1.

88. The cell line of claim 81, wherein said cell is a mammalian cell.

89. The cell line of claim 88, wherein said cell is a human cell.

90. The cell line of claim 81, wherein said viral vector is an adenoviral vector.

91. The cell line of claim 81, wherein said viral vector is a retroviral vector.

92. A cell which is genetically engineered to express a THAP-family polypeptide or a biologically active fragment thereof.

93. The cell line of claim 92, wherein said THAP-family polypeptide is THAP1.

94. The cell line of claim 92, wherein said cell is a mammalian cell.

95. The cell line of claim 92, wherein said cell is a human cell.

96. The cell line of claim 92, wherein said THAP family polypeptide is encoded by a gene that is introduced into the cell on an adenoviral vector.

97. The cell line of claim 92, wherein said THAP family polypeptide is encoded by a gene that is introduced into the cell on a retroviral vector.

98. A method of constructing a cell which expresses a recombinant THAP-family polypeptide, said method comprising introducing into a cell a vector comprising a nucleic acid encoding a THAP-family polypeptide or a biologically active fragment thereof operably linked to a promoter.

99. The method of claim 98, further comprising introducing into a cell a nucleic acid construct comprising a nucleic acid encoding a chemokine operably linked to a promoter.

100. The method of claim 99, wherein said chemokine-encoding construct is included on the same vector as said nucleic acid encoding said THAP-family polypeptide or biologically active fragment thereof.

101. The method of claim 99, wherein said nucleic acid encoding said chemokine encodes a chemokine selected from the group consisting of SLC, CCL19, CCL5, CXCL11, CXCL10 and CXCL9.

102. The method of claim 99, wherein said nucleic acid encoding said chemokine encodes SLC.

103. The method of claim 99, wherein said nucleic acid encoding said chemokine encodes CXCL9.

104. The method of claim 98, wherein said THAP-family polypeptide is THAP1.

105. The method of claim 98, wherein said cell is a mammalian cell.

106. The method of claim 105, wherein said cell is a human cell.

107. The method of claim 98, wherein said vector is a viral vector.

108. The method of claim 107, wherein said vector is an adenoviral vector.

109. The method of claim 107, wherein said vector is a retroviral vector.

110. The method of claim 98, wherein said vector is introduced into said cell by transfection.

111. A method of ameliorating symptoms associated with a condition mediated by a THAP/chemokine complex, said method comprising:
introducing into a cell a nucleic acid construct comprising a nucleic acid encoding a chemokine operably linked to a promoter and a nucleic acid construct comprising a nucleic acid encoding a THAP-family polypeptide or a biologically active fragment thereof operably linked to a promoter; and
expressing said nucleic acid encoding said chemokine and said nucleic acid encoding said THAP-family polypeptide or biologically active fragment thereof.

112. The method of claim 111, wherein said nucleic acid constructs are present on a single vector.

113. The method of claim 111, wherein said nucleic acid constructs are present on different vectors.

114. The method of claim 111, wherein said cell is a mammalian cell.

115. The method of claim 114, wherein said cell is a human cell.

116. The method of claim 111, wherein said nucleic acid encoding said chemokine encodes a chemokine selected from the group consisting of SLC, CCL19, CCL5, CXCL11, CXCL10 and CXCL9.

117. The method of claim 111, wherein said nucleic acid encoding said chemokine encodes SLC.

118. The method of claim 111, wherein said nucleic acid encoding said chemokine encodes CXCL9.

119. The method of claim 111, wherein said THAP-family polypeptide is THAP1.

120. A method of identifying a test compound that modulates transcription at a THAP responsive element, said method comprising:
comparing the level of transcription from a THAP responsive promoter in the presence and absence of a test compound wherein a determination that the level of transcription is increased or decreased in the presence of said test compound relative to the level of transcription in the absence of said test compound indicates that said test compound is a candidate modulator of transcription.

121. The method of claim 120, wherein the level of transcription from said THAP responsive promoter in the presence and absence of the test compound is determined by performing an in vitro transcription reaction using a construct comprising said THAP responsive promoter and a THAP-family polypeptide or a biologically active fragment thereof, wherein said THAP-family polypeptide comprises an amino acid sequence having at least 30% amino acid identity to an amino acid sequence of SEQ ID NO: 1.

122. The method of claim 120, wherein the level of transcription from said THAP responsive promoter in the presence and the absence of the test compound is determined by measuring the level of transcription from a THAP responsive promoter in a cell expressing a THAP-family polypeptide or a biologically active fragment thereof, wherein said THAP-family polypeptide comprises an amino acid sequence having at least 30% amino acid identity to an amino acid sequence of SEQ ID NO: 1.

123. The method of claim 120, wherein said THAP-family polypeptide or biologically active fragment thereof is selected from the group consisting of SEQ ID NOs: 1-114 and biologically active fragments thereof.

124. The method of claim 120, wherein said THAP responsive promoter comprises a THAP responsive element having a nucleotide sequence selected from the group consisting of SEQ ID NOs: 140-159, SEQ ID NO: 306, and homologs thereof having at least 60% nucleotide identity.

125. The method of claim 121 or claim 122, wherein the level of transcription in the presence or absence of said test compound is measured in the presence of a chemokine.

126. The method of claim 125, wherein said chemokine is selected from the group consisting of CCL family chemokines and CXCL family chemokines.

127. The method of claim 126, wherein said CCL family chemokine is selected from the group consisting of SLC, CCL19 and CCL5.

128. The method of claim 126, wherein said CXCL family chemokine is selected from the group consisting of CXCL11, CXCL10 and CXCL9.

129. The method of claim 125, wherein the level of transcription in the presence or absence of said test compound is measured in a cell which expresses a receptor for said chemokine.

130. The method of claim 129, wherein said chemokine receptor is selected from the group consisting of CCR1, CCR3, CCR5, CCR7, CCR11 and CXCR3.

131. The method of claim 130, wherein said chemokine is selected from the group consisting of SLC, CCL19, CCL5, CXCL11, CXCL10 and CXCL9.

132. The method of claim 129, wherein said THAP-family polypeptide comprises THAP1 or a biologically active fragment thereof and said cell expresses the CCR7 receptor.

133. The method of claim 132, wherein said chemokine is SLC.

134. The method of claim 129, wherein said THAP-family polypeptide comprises THAP1 or a biologically active fragment thereof and said cell expresses the CXCR3 receptor.

135. Them method of claim 134, wherein said chemokine is CXCL9.

136. The method of claim 122, wherein said THAP responsive promoter is in a gene endogenous to said cell.

137. The method of claim 122, wherein said THAP responsive promoter has been introduced into said cell.

138. The method of claim 122, wherein said THAP responsive promoter does not comprise a THAP responsive element.

139. The method of claim 138, wherein said THAP responsive promoter is modulated by a product of a gene that is under the control of a promoter which comprises a THAP responsive element.

140. A method for reducing the symptoms associated with a condition selected from the group consisting of excessive or insufficient angiogenesis, inflammation, metastasis of a cancerous tissue, excessive or insufficient apoptosis, cardiovascular disease and neurodegenerative diseases comprising modulating the interaction between a THAP-family polypeptide and a chemokine in an individual suffering from said condition.

141. The method of claim 140, wherein said THAP-family polypeptide is selected from a group consisting of polypeptides having an amino acid sequence of SEQ ID NOs: 1-114.

142. The method of claim 140, wherein said chemokine is selected from the group consisting of SLC, CCL19, CCL5, CXCL11, CXCL10 and CXCL9.

143. The method of claim 140, wherein said chemokine is SLC and the condition is inflammation.

144. The method of claim 140, wherein said chemokine is SLC and the condition is excessive or insufficient angiogenesis.

145. The method of claim 140, wherein said chemokine is CXCL9 and the condition is inflammation.

146. The method of claim 140, wherein said chemokine is CXCL9 and the condition is excessive or insufficient angiogenesis.

147. A method for reducing the symptoms associated with a condition resulting from the activity of a chemokine in an individual comprising modulating the interaction between said chemokine and a THAP-family polypeptide in said individual.

148. The method of claim 147, wherein said chemokine is selected from the group consisting of SLC, CCL19, CCL5, CXCL1, CXCL10 and CXCL9.

149. The method of claim 147, wherein said chemokine is SLC.

150. The method of claim 147, wherein said chemokine is CXCL9.

151. The method of claim 147, wherein said THAP-family polypeptide is THAP-1.

152. The method of claim 147, wherein the condition is inflammation.

153. The method of claim 147, wherein the condition is excessive or insufficient angiogenesis.

154. The method of claim 147, wherein the interaction between said chemokine and said THAP-family polypeptide is modulated by administering to an individual, a therapeutically effective amount of a THAP-type chemokine-binding agent.

155. The method of claim 154, wherein said THAP-type chemokine-binding agent comprises a therapeutically effective amount of a polypeptide selected from the group consisting of a THAP1 polypeptide, an chemokine-binding domain of a THAP1 polypeptide, a THAP1 polypeptide oligomer, an oligomer comprising a THAP1 chemokine-binding domain, a THAP1 polypeptide-immunoglobulin fusion, a THAP1 chemokine-binding domain-immunoglobulin fusion and polypeptide homologs having at least 30% amino acid identity to any one of the aforementioned polypeptides.

156. The method of claim 155, wherein said chemokine-binding domain is an SLC-binding domain.

157. The method of claim 155, wherein said chemokine-binding domain is a CXCL9-binding domain.

158. A method of reducing the symptoms associated with a condition resulting from the activity of a THAP-family polypeptide in an individual comprising modulating the extent of transcriptional repression or activation of at least one THAP-family responsive promoter in said individual.

159. The method of claim 158, wherein said THAP-family polypeptide comprises an amino acid sequence selected from the group consisting of SEQ ID NOs: 1-114.

160. The method of claim 158, wherein said THAP-family polypeptide comprises an amino acid sequence of SEQ ID NO: 3.

161. The method of claim 158, wherein said THAP responsive promoter comprises a THAP responsive element.

162. The method of claim 158, wherein said THAP responsive promoter does not comprise a THAP responsive element.

163. A method of reducing the symptoms associated with a condition resulting from the activity of a THAP-family polypeptide in an individual, said method comprising:
diagnosing said individual with a condition resulting from the activity of a THAP-family polypeptide; and
administering a compound which modulates the interaction between said THAP-family polypeptide and a chemokine to said individual.

164. The method of claim 163, wherein said THAP-family polypeptide is selected from a group consisting of polypeptides having an amino acid sequence of SEQ ID NOs: 1-114.

165. The method of claim 163, wherein said THAP-family polypeptide is THAP1.

166. The method of claim 163, wherein said chemokine is selected from the group consisting of SLC, CCL19, CCL5, CXCL11, CXCL10 and CXCL9.

167. The method of claim 163, wherein said chemokine is SLC.

168. The method of claim 163, wherein said chemokine is CXCL9.

169. A method of reducing the symptoms associated with a condition resulting from the activity of a THAP-family polypeptide in an individual comprising:
diagnosing said individual with a condition resulting from the activity of THAP-family polypeptide; and
administering a chemokine or an analog thereof to said individual.

170. The method of claim 169, wherein said THAP-family polypeptide is selected from a group consisting of polypeptides having an amino acid sequence of SEQ ID NOs: 1-114.

171. The method of claim 169, wherein said THAP-family polypeptide is THAP1.

172. The method of claim 169, wherein said chemokine is selected from the group consisting of SLC, CCL19, CCL5, CXCL11, CXCL10 and CXCL9.

173. The method of claim 169, wherein said chemokine is SLC.

174. The method of claim 169, wherein said chemokine is CXCL9.

175. A method of reducing the symptoms associated with transcriptional repression or activation mediated by a THAP-family polypeptide in an individual comprising administering a chemokine or an analog thereof to said individual.

176. The method of claim 175, wherein said THAP-family polypeptide is selected from a group consisting of polypeptides having an amino acid sequence of SEQ ID NOs: 1-114.

177. The method of claim 175, wherein said THAP-family polypeptide is THAP1.

178. The method of claim 175, wherein said chemokine is selected from the group consisting of SLC, CCL19, CCL5, CXCL11, CXCL10 and CXCL9.

179. The method of claim 175, wherein said chemokine is SLC.

180. The method of claim 175, wherein said chemokine is CXCL9.

181. A method of reducing the symptoms associated with the activity of a chemokine in an individual comprising modulating the extent to which said chemokine is transported to the nucleus of a cell in said individual.

182. The method of claim 181, wherein said chemokine is selected from the group consisting of SLC, CCL19, CCL5, CXCL11, CXCL10 and CXCL9.

183. The method of claim 181, wherein said cell expresses a chemokine receptor selected from the group consisting of CCR1, CCR3, CCR5, CCR7, CCR11 and CXCR3.

184. The method of claim 183, wherein said chemokine is SLC and said chemokine receptor is CCR7.

185. The method of claim 183, wherein said chemokine is CXCL9 and said chemokine receptor is CXCR3.

186. The method of claim 181, wherein the extent of transport of said chemokine into a nucleus of a cell is modulated by contacting said chemokine with a THAP-type chemokine-binding agent.

187. The method of claim 186, wherein said THAP-type chemokine-binding agent selected from the group consisting of a THAP1 polypeptide, a chemokine-binding domain of a THAP1 polypeptide, a THAP1 polypeptide oligomer, an oligomer comprising a THAP1 chemokine-binding domain, a THAP1 polypeptide-immunoglobulin fusion, a THAP1 chemokine-binding domain-immunoglobulin fusion and polypeptide homologs having at least 30% amino acid identity to any one of the aforementioned polypeptides.

188. The method of claim 187, wherein said chemokine-binding domain is an SLC-binding domain.

189. The method of claim 187, wherein said chemokine-binding domain is a CXCL9-binding domain.

190. A method for identifying a compound which modulates the transport of a chemokine into the nucleus comprising comparing the extent of said chemokine transport into the nucleus of cells in the presence and absence of a test compound.

191. The method of claim 190, wherein said chemokine is selected from the group consisting of SLC, CCL19, CCL5, CXCL11, CXCL10 and CXCL9.

192. The method of claim 190, wherein said cell expresses a chemokine receptor selected from the group consisting of CCR1, CCR3, CCR5, CCR7, CCR11 and CXCR3.

193. The method of claim 192, wherein said chemokine is SLC and said chemokine receptor is CCR7.

194. The method of claim 192, wherein said chemokine is CXCL9 and said chemokine receptor is CXCR3.

195. The method of claim 190, wherein the extent of transport of said chemokine into a nucleus of a cell is modulated by contacting said chemokine with a THAP-type chemokine-binding agent.

196. The method of claim 195, wherein said THAP-type chemokine-binding agent is selected from the group consisting of a THAP1 polypeptide, a chemokine-binding domain of a THAP1 polypeptide, a THAP1 polypeptide oligomer, an oligomer comprising a THAP1 chemokine-binding domain, a THAP1 polypeptide-immunoglobulin fusion, a THAP1 chemokine-binding domain-immunoglobulin fusion and polypeptide homologs having at least 30% amino acid identity to any one of the aforementioned polypeptides.

197. The method of claim 196, wherein said chemokine-binding domain is an SLC-binding domain.

198. The method of claim 196, wherein said chemokine-binding domain is a CXCL9-binding domain.

199. The method of claim 190, wherein transport of SLC into the nucleus is measured by immunostaining.

200. A vector comprising a THAP responsive promoter operably linked to a nucleic acid encoding a detectable product.

201. The vector of claim 200, wherein said THAP responsive promoter comprises a THAP responsive element.

202. The vector of claim 200, wherein said THAP responsive promoter does not comprise a THAP responsive element.

203. A genetically engineered cell comprising the vector of any one of claims 200-202.

204. An in vitro transcription reaction comprising a nucleic acid comprising a THAP responsive promoter, ribonucleotides and an RNA polymerase.

205. The in vitro transcription reaction of claim 204, wherein said THAP responsive promoter comprises a THAP responsive element.

206. An isolated mutant THAP-family polypeptide that does not bind to a chemokine.

207. The isolated mutant THAP-family polpeptide of claim 206, wherein said chemokine is selected from the group consisting of SLC, CCL19, CCL5, CXCL11, CXCL10 and CXCL9.

208. The isolated mutant THAP-family polypeptide of claim 206, wherein said chemokine is SLC.

209. The isolated mutant THAP-family polypeptide of claim 206, wherein said chemokine is CXCL9.

210. The isolated mutant THAP-family polypeptide of claim 206, wherein said THAP-family polypeptide is THAP1.

211. The isolated mutant THAP-family polypeptide of claim 210, wherein said polypeptide comprises an amino acid sequence of SEQ ID NO: 3.

212. The isolated mutant THAP-family polypeptide of claim 211, wherein said amino acid sequence comprises at least one point mutation.
